(19) United States
(12) Patent Application Publication
(10) Pub. No.: US 2016/0251675 A1
(43) Pub. Date: Sep. 1, 2016

(54) Drought-Resistant Cereal Grasses and Related Materials and Methods

(71) Applicants: Amelia HENRY, Laguna (PH); INTERNATIONAL RICE RESEARCH INSTITUTE, Metro Manila (PH)

(72) Inventors: Amelia Henry, Laguna (PH); Ajay Kohli, Metro Manila (PH); Arvind Kumar, Metro Manila (PH)

(21) Appl. No.: 15/027,896

(22) PCT Filed: Oct. 8, 2014
(86) PCT No.: PCT/US14/59676

§ 371 Date: Apr. 7, 2016

Related U.S. Application Data
(60) Provisional application No. 61/888,397, filed on Oct. 8, 2013.
(60) Provisional application No. 61/994,558, filed on May 16, 2014.

(51) Int. Cl. C12N 15/82; A01H 5/10; C12Q 1/68; A01H 1/02

(52) U.S. Cl. CPC C12N 15/8273; A01H 1/02; A01H 5/10; C12Q 1/6895; C12Q 2600/13; C12Q 2600/156

(57) ABSTRACT

Described herein are methods and materials useful for improving lateral root growth, water uptake, and the yield of grain of cereal grasses grown under drought stress conditions. In particular, the present disclosure provides a quantitative trait locus associated with improved yield under drought stress. The disclosure further provides recombinant DNA for the generation of transgenic plants, transgenic plant cells, and methods of producing the same. The present disclosure further provides methods for generating transgenic seed that can be used to produce a transgenic plant having improved yield under drought stress, and methods for improving yield under drought stress in a cereal grass involving marker assisted selection and backcrossing.

### CROSS REFERENCE TO RELATED APPLICATIONS

[0001] This application claims the priority benefit of U.S. Provisional Application No. 61/888,397, filed Oct. 8, 2013, and U.S. Provisional Application No. 61/994,558, filed May 16, 2014, the entire disclosures of which are expressly incorporated herein by reference for all purposes.

### STATEMENT REGARDING GOVERNMENT FUNDING

[0002] This invention was not made with United States Government support.

### STATEMENT REGARDING SEQUENCE LISTING

[0003] The Sequence Listing, filed electronically and identified as 53-55195-IRRI-13-005_SL.txt, was created on Oct. 8, 2014, is 4,929,609 bytes in size and is hereby incorporated by reference.

### BACKGROUND OF THE INVENTION

[0004] Cereal grasses, cultivated for their edible seeds, are grown in greater quantities and provide more food energy worldwide than any other type of crop. Cereal grasses comprise a range of crops, including corn, rice, wheat, barley, sorghum, millet, oats, and rye. Together, maize, wheat and rice account for nearly half of all food calories consumed globally. Drought is one of the most important and damaging abiotic stresses for all cereal grasses. With rice, drought severely hampers rice productivity in rainfed areas. In Asia, more that 23 million ha of rice are rainfed. Eastern India and adjoining areas of Nepal occupy a large drought-affected area with an estimate of around 17 million ha. In 2004, widespread severe drought in much of Asia not only resulted in agricultural production losses of hundreds of millions of dollars, but also pushed millions of people into poverty. In Thailand, drought hit 70 of the country's 76 provinces and affected more than 8 million people. Production loss from major crop failures covering 2 million hectares is estimated at US$326 million, resulting in a 3.9% decline in the 2004 agricultural gross domestic product (GDP). More than half of the rural population of Thailand relies on farm income for their livelihoods. In 2004, the normally lush tropical southern Chinese island of Hainan suffered its worst drought in 50 years, with 12 million hectares of farmland affected. Vietnam's eight central highland provinces suffered their worst drought in 28 years, affecting around 1 million people and causing an estimated $80 million worth of crop losses. In March 2005, Cambodian Prime Minister Hun Sen called for international assistance for a national campaign to help farmers who are short of water. Coping with recurrent drought is part of life for millions of Asia's rural poor.

[0005] Drought is an extended period of substantially lower-than-usual rainfall, leading to a shortage of water for domestic use and agriculture. Drought may affect rice by several mechanisms, including: inhibition of leaf production and decline in leaf area, leading to retarded leaf growth and light interception; closure of stomata, leading to reduced transpiration rates and reduced photosynthesis; leaf rolling, leading to reduction in effective leaf area available for light interception; enhanced leaf senescence, or leaf deaths, leading to reduced canopy photosynthesis; reduced plant height and spikelet number, resulting in low yield production; spikelet sterility, resulting in decreased percentage of filled spikelets; delayed flowering, caused by drought during the vegetative development stage; reduced tillering and tiller death, resulting in a reduction in the number of tillers and panicles per hill; and decreased grain weight, if drought occurs during flowering.

[0006] With increasing incidence and severity of drought, popular rice varieties grown by Asian farmers are not keeping up with the needs of the farmer or of the global population. Progress has, however, been slow in developing rice varieties that thrive under drought stress. This is mainly due to the complex nature of drought-tolerant mechanisms: large genotype×environment; quantitative trait locus (QTL)×environment and QTL×recipient genetic background interactions; and the absence of QTLs with a large and consistent effect against high-yielding but drought-susceptible varieties. The problem is further complicated by the number of physiological mechanisms and biochemical pathways affected by drought. And while several drought-tolerant rice varieties have been developed, it remains the ultimate aim of plant breeders to identify rice genotypes with a stable performance across a range of environments. This can be a very time-consuming process.

[0007] A marker-assisted breeding (MAB) strategy, advocated to be a fast-track approach in rice improvement for drought-prone environments, can be a suitable alternative strategy. The marker assisted backcrossing (MABC) approach has been used to improve the drought tolerance of high-yielding, popular, farmer-adapted varieties grown on a large scale. QTLs with large and consistent effects are worthy for use in marker-assisted selection (MAS) to improve the drought tolerance of presently cultivated varieties. The most suitable QTL for drought would be one that can overcome QTL×genetic background, QTL×environment, and QTL×ecosystem effects. One skilled in the art will recognize that the identification and introgression of QTLs in the background of elite rice varieties could be helpful in MAB and the generation of new drought-tolerant varieties.

### SUMMARY OF THE INVENTION

[0008] Described herein are methods and materials useful for improving lateral root growth, water uptake, and the yield of grain of cereal grasses grown under drought stress conditions. In particular, the present disclosure provides a quantitative trait locus associated with improved yield under drought stress. The disclosure further provides recombinant DNA for the generation of transgenic plants, transgenic plant cells, and methods of producing the same. The present disclosure further provides methods for generating transgenic seed that can be used to produce a transgenic plant having improved yield under drought stress, and methods for improving yield under drought stress in a cereal grass involving marker assisted selection and backcrossing.

[0009] In a particular embodiment described herein, is a method of improving lateral root growth and water uptake in a cereal grass comprising: a) crossing a crossing plant of one variety of cereal grass having chromosomal DNA that comprises a nucleic acid comprising qDTY_{12.1}, or a yield-improving part thereof, with a recipient plant of a distinct variety of cereal grass having chromosomal DNA that does not include a nucleic acid comprising qDTY_{12.1}, or a yield-improving part thereof; and b) selecting one or more progeny plants having chromosomal DNA that comprises a nucleic acid comprising qDTY_{12.1}, or a yield-improving part thereof, wherein qDTY_{12.1}, or a yield-improving part thereof, is detected in the crossing plant, recipient plant, or one or more progeny plants by analyzing genomic DNA from the crossing plant, the recipient plant, or one or more progeny plant, or germplasm, pollen, or seed thereof, for the presence of at least one molecular marker linked to qDTY_{12.1}, or a yield-improving part thereof, wherein the at least one molecular marker is selected from the group consisting of: RM28048; RM28076; RM28089; RM28099; RM28130; RM511; RM1261; RM28166; RM28199; and Indel-8, and wherein a selected one or more progeny plant having DNA that comprises a nucleic acid comprising qDTY_{12.1}, or a yield-improving part thereof, has improved lateral root growth and water uptake.

[0010] In another embodiment described herein, the method of improving lateral root growth and water uptake in a cereal grass further comprises the steps: a) backcrossing the one or more selected progeny plants to produce backcross progeny plants; and b) selecting one or more backcross progeny plants having chromosomal DNA that comprises a nucleic acid comprising qDTY_{12.1}, or a yield-improving part thereof, wherein qDTY_{12.1}, or a yield-improving part thereof, is detected in the one or more backcross progeny plants by analyzing genomic DNA from the one or more backcross progeny plants, or germplasm, pollen, or seed thereof, for the presence of at least one molecular marker linked to qDTY_{12.1}, or a yield-improving part thereof, wherein the at least one molecular marker is selected from the group consisting of: RM28048; RM28076; RM28089; RM28099; RM28130; RM511; RM1261; RM28166; RM28199; and Indel-8. In yet another embodiment described herein, these two steps are repeated one or more times to produce third or higher backcross progeny plants having chromosomal DNA that comprises a nucleic acid comprising qDTY_{12.1}, or a yield-improving part thereof, wherein qDTY_{12.1}, or a yield-improving part thereof, is detected in the one or more backcross progeny plants by analyzing genomic DNA from the one or more backcross progeny plants, or germplasm, pollen, or seed thereof, for the presence of at least one molecular marker linked to qDTY_{12.1}, or a yield-improving part thereof, wherein the at least one molecular marker is selected from the group consisting of: RM28048; RM28076; RM28089; RM28099; RM28130; RM511; RM1261; RM28166; RM28199; and Indel-8.

[0011] In certain embodiments, the physiological and morphological characteristics of the recipient plant, other than those of lateral root growth and water uptake, are retained. In other embodiments, at least one of the crossing plant and the recipient plant has chromosomal DNA comprising a nucleic acid having at least 70% sequence identity to Ulp1. In yet other embodiments, the selected one or more progeny plants is further selected for having increased lateral root growth relative to a control plant.

[0012] In another embodiment described herein, the selected one or more progeny plants is further selected for having increased lateral root growth relative to a control plant in both well watered and drought conditions. In other embodiments, the selected one or more progeny plants is further selected for having improved yield under drought conditions relative to a control plant. In yet other embodiments, the selected one or more progeny plants is further selected for having at least one trait associated with improved yield under drought conditions selected from the group consisting of: increased sucrose content in flag leaf relative to a control plant; increased sucrose content in spikelets relative to a control plant; increased starch content in spikelets relative to a control plant; and increased carbon reserves in roots relative to a control plant.

[0013] In another embodiment described herein, the cereal grass is selected from the group consisting of: rice; corn; wheat; barley; sorghum; millet; oats; and rye. In another embodiment, the cereal grass is rice. In yet another embodiment, the cereal grass is corn.

[0014] In other embodiments described herein, the crossing plant is a rice plant selected from the group consisting of: WayRarem; IR79971-B-102-B; and IR74371-46-1-1. In another embodiment, the recipient plant is a rice plant selected from the group consisting of: Vandana; Kalinga 3; Anjali; IR64; Swarna; Sambha Mahsuri; MTU1010, Lalat; Naveen; Sabitri; BR11; BR29; BR28; TDK1; TDK 9; and Chirang.

[0015] In another embodiment described herein, the yield improving part of qDTY_{12.1} comprises one or more nucleic acids sharing at least 70% identity with one or more nucleic acids of the group of nucleic acids consisting of: SEQ ID NO: 2 (OsNAM_{12.1}); SEQ ID NO: 3 (OsGPDP_{12.1}); SEQ ID NO: 4 (OsGPDP_{12.1}); SEQ ID NO: 5 (OsGPDP_{12.1}); SEQ ID NO: 6 (OsSTPK_{12.1}); SEQ ID NO: 7 (OsSTPK_{12.1}); SEQ ID NO: 8 (OsSTPK_{12.1}); SEQ ID NO: 9 (OsPOle_{12.1}); SEQ ID NO: 10 (OsMtN3_{12.1}); SEQ ID NO: 11 (OsWAK_{12.1}); SEQ ID NO: 12 (OsCesA_{12.1}); SEQ ID NO: 13 (OsGDP_{12.1}); SEQ ID NO: 14 (OsARF_{12.1}); SEQ ID NO: 15 (OsARF_{12.1}); SEQ ID NO: 16 (OsARF_{12.1}); SEQ ID NO: 17 (OsARF_{12.1}); SEQ ID NO: 18 (OsARF_{12.1}); SEQ ID NO: 20 (OsAmh_{12.1}); and SEQ ID NO: 21 (OsAmh_{12.1}). In yet another embodiment, the yield improving part of qDTY_{12.1} comprises a nucleic acid sharing an identity with SEQ ID NO: 2 (OsNAM_{12.1}) selected from the group consisting of: at least 70% identity; at least 75% identity; at least 80% identity; at least 85% identity; at least 90% identity; at least 95% identity; at least 96% identity; at least 97% identity; at least 98% identity; at least 99% identity; and 100% identity.

[0016] In another embodiment described herein, the crossing plant, in addition to having chromosomal DNA that comprises a nucleic acid comprising qDTY12.1, or a yield-improving part thereof, also comprises a nucleic acid comprising qDTY_{2.3}. In another embodiment, the recipient plant has chromosomal DNA that comprises a nucleic acid comprising qDTY_{2.3}.

[0017] In a particular embodiment described herein, is a method of improving lateral root growth and water uptake in a cereal grass comprising: a) crossing a crossing plant of one variety of cereal grass having chromosomal DNA that comprises a nucleic acid sharing an identity with SEQ ID NO: 2 (OsNAM_{12.1}) selected from the group consisting of: at least 70% identity; at least 75% identity; at least 80% identity; at least 85% identity; at least 90% identity; at least 95% identity; at least 96% identity; at least 97% identity; at least 98% identity; at least 99% identity; and 100% identity, with a recipient plant of a distinct variety of cereal grass having chromosomal DNA that does not include a nucleic acid sharing at least 70% identity with SEQ ID NO: 2 (OsNAM_{12.1}); and b) selecting one or more progeny plants having chromosomal DNA that comprises a nucleic acid sharing an identity with SEQ ID NO: 2 (OsNAM_{12.}) selected from the group consisting of: at least 70% identity; at least 75% identity; at least 80% identity; at least 85% identity; at least 90% identity; at least 95% identity; at least 96% identity; at least 97% identity; at least 98% identity; at least 99% identity; and 100% identity.

[0018] In certain embodiments described herein, the nucleic acid sharing an identity with SEQ ID NO: 2 (OsNAM_{12.}) selected from the group consisting of: at least 70% identity; at least 75% identity; at least 80% identity; at least 85% identity; at least 90% identity; at least 95% identity; at least 96% identity; at least 97% identity; at least 98% identity; at least 99% identity; and 100% identity is detected by RT-PCR.

[0019] In another embodiment described herein, the method of improving lateral root growth and water uptake in a cereal grass further comprising the steps: c) backcrossing the one or more selected progeny plants produce backcross progeny plants; and d) selecting one or more backcross progeny plants having chromosomal DNA that comprises a nucleic acid sharing an identity with SEQ ID NO: 2 (OsNAM_{12.}) selected from the group consisting of: at least 70% identity; at least 75% identity; at least 80% identity; at least 85% identity; at least 90% identity; at least 95% identity; at least 96% identity; at least 97% identity; at least 98% identity; at least 99% identity; and 100% identity. In certain embodiments, these steps are repeated one or more times to produce third or higher backcross progeny plants having chromosomal DNA that comprises a nucleic acid sharing an identity with SEQ ID NO: 2 (OsNAM_{12.}) selected from the group consisting of: at least 70% identity; at least 75% identity; at least 80% identity; at least 85% identity; at least 90% identity; at least 95% identity; at least 96% identity; at least 97% identity; at least 98% identity; at least 99% identity; and 100% identity.

[0020] In another embodiment described herein, the at least one of the crossing plant and the recipient plant has chromosomal DNA comprising a nucleic acid having at least 70% sequence identity to Ulp1, wherein Ulp1 encodes a functional deSUMOylating protease capable of deSUMOylating a polypeptide encoded by the nucleic acid sharing an identity with SEQ ID NO: 2 (OsNAM_{12.}) selected from the group consisting of: at least 70% identity; at least 75% identity; at least 80% identity; at least 85% identity; at least 90% identity; at least 95% identity; at least 96% identity; at least 97% identity; at least 98% identity; at least 99% identity; and 100% identity.

[0021] In another embodiment described herein, is a method for selecting a cereal grass plant having improved lateral root growth and water uptake relative to a control cereal grass plant, comprising: a) inducing expression or increasing expression in a cereal grass plant a nucleic acid comprising qDTY_{12.1}, or a yield-improving part thereof, wherein the induced or increased expression of the nucleic acid comprising qDTY_{12.1}, or a yield-improving part thereof, is obtained by transforming and expressing in the cereal grass plant the nucleic acid comprising qDTY_{12.1}, or a yield-improving part thereof; and b) selecting a cereal grass plant having improved lateral root growth and water uptake relative to a control cereal grass plant, wherein the cereal grass plant having improved lateral root growth and water uptake relative to a control cereal grass plant is selected by analyzing genomic DNA from the cereal grass plant, or germplasm, pollen, or seed thereof, and detecting therein at least one molecular marker linked to qDTY12.1, or a yield-improving part thereof, wherein the at least one molecular marker is selected from the group consisting of: RM28048; RM28076; RM28089; RM28099; RM28130; RM511; RM1261; RM28166; RM28199; and Indel-8. In another embodiment, the cereal grass plant has chromosomal DNAcomprising a nucleic acid having at least 70% sequence identity to Ulp1.

[0022] In another embodiment described herein, the induced or increased expression of the nucleic acid comprising qDTY12.1, or a yield-improving part thereof, is a result of introducing and expressing the nucleic acid comprising qDTY_{12.1}, or a yield-improving part thereof, in the cereal grass plant under control of at least one promoter functional in plants. In certain embodiments, the at least one promoter and the nucleic acid comprising qDTY_{12.1}, or yield improving part thereof, are operably linked.

[0023] In a particular embodiment described herein, is a method for generating a cereal grass plant having improved lateral root growth and water uptake relative to a control cereal grass plant comprising: a) transforming a cereal grass plant cell, cereal grass plant, or part thereof with a construct comprising: 1) a nucleic acid encoding a polypeptide having a sequence identity selected from the group consisting of: at least 70% identity; at least 75% identity; at least 80% identity; at least 85% identity; at least 90% identity; at least 95% identity; at least 96% identity; at least 97% identity; at least 98% identity; at least 99% identity; and 100% identity to nucleic acid sequence SEQ ID NO: 2 (OsNAM_{12.1}); 2) a promoter operably linked to the nucleic acid; and 3) a transcription termination sequence; and b) expressing the construct in a cereal grass plant cell, cereal grass plant, or part thereof, thereby generating a cereal grass plant having improved lateral root growth and water uptake relative to a control cereal grass plant.

[0024] In another embodiment described herein, the construct further comprises one or more nucleic acids sharing at an identity selected from the group consisting of: at least 70% identity; at least 75% identity; at least 80% identity; at least 85% identity; at least 90% identity; at least 95% identity; at least 96% identity; at least 97% identity; at least 98% identity; at least 99% identity; and 100% identity, with one or more nucleic acids of the group of nucleic acids consisting of: SEQ ID NO: 3 (OsGPDP_{12.1}); SEQ ID NO: 4 (OsGPDP_{12.1}); SEQ ID NO: 5 (OsGPDP_{12.1}); SEQ ID NO: 6 (OsSTPK_{12.1}); SEQ ID NO: 7 (OsSTPK_{12.1}); SEQ ID NO: 8 (OsSTPK_{12.1}); SEQ ID NO: 9 (OsPOle_{12.1}); SEQ ID NO: 10 (OsMtN3_{12.1}); SEQ ID NO: 11 (OsWAK_{12.1}); SEQ ID NO: 12 (OsCesA_{12.1}); SEQ ID NO: 13 (OsGDP_{12.1}); SEQ ID NO: 14 (OsARF_{12.1}); SEQ ID NO: 15 (OsARF_{12.1}); SEQ ID NO: 16 (OsARF_{12.1}); SEQ ID NO: 17 (OsARF_{12.1}); SEQ ID NO: 18 (OsARF_{12.1}); SEQ ID NO: 20 (OsAmh_{12.1}); and SEQ ID NO: 21 (OsAmh_{12.1}).

[0025] In another embodiment described herein, the construct further comprises a nucleic acid having at least 70% sequence identity to Ulp1, wherein the nucleic acid encoding a deSUMOylating protease encodes a functional deSUMOylating protease capable of deSUMOylating a polypeptide encoded by the nucleic acid sharing an identity with SEQ ID NO: 2 (OsNAM_{12.}) selected from the group consisting of: at least 70% identity; at least 75% identity; at least 80% identity; at least 85% identity; at least 90% identity; at least 95% identity; at least 96% identity; at least 97% identity; at least 98% identity; at least 99% identity; and 100% identity.

[0026] In a particular aspect described herein, is a method for the production of a transgenic cereal grass plant having improved lateral root growth and water uptake relative to a control cereal grass plant comprising: a) transforming and expressing in a cereal grass plant cell at least one nucleic acid having at a sequence identity selected from the group consisting of: at least 70% identity; at least 75% identity; at least 80% identity; at least 85% identity; at least 90% identity; at least 95% identity; at least 96% identity; at least 97% identity; at least 98% identity; at least 99% identity; and 100% identity with one or more nucleic acids of the group of nucleic acids consisting of: SEQ ID NO: 2 (OsNAM_{12.1}); SEQ ID NO: 3 (OsGPDP_{12.1}); SEQ ID NO: 4 (OsGPDP_{12.1}); SEQ ID NO: 5 (OsGPDP_{12.1}); SEQ ID NO: 6 (OsSTPK_{12.1}); SEQ ID NO: 7 (OsSTPK_{12.1}); SEQ ID NO: 8 (OsSTPK_{12.1}); SEQ ID NO: 9 (OsPOle_{12.1}); SEQ ID NO: 10 (OsMtN3_{12.1}); SEQ ID NO: 11 (OsWAK_{12.1}); SEQ ID NO: 12 (OsCesA_{12.1}); SEQ ID NO: 13 (OsGDP_{12.1}); SEQ ID NO: 14 (OsARF_{12.1}); SEQ ID NO: 15 (OsARF_{12.1}); SEQ ID NO: 16 (OsARF_{12.1}); SEQ ID NO: 17 (OsARF_{12.1}); SEQ ID NO: 18 (OsARF_{12.1}); SEQ ID NO: 20 (OsAmh_{12.1}); and SEQ ID NO: 21 (OsAmh_{12.1}); and b) cultivating the cereal grass plant cell under conditions promoting plant growth and development, and obtaining transformed plants expressing one or more of OsNAM_{12.1}, OsGPDP_{12.1}, OsSTPK_{12.1}, OsPOle_{12.1}, OsMtN3_{12.1}, OsWAK_{12.1}, OsCesA_{12.1}, OsGDP_{12.1}, OsARF_{12.1}, and OsAmh_{12.1}.

[0027] In another embodiment described herein, the method for the production of a transgenic cereal grass plant having improved lateral root growth and water uptake relative to a control cereal grass plant further comprises transforming and expressing in the cereal grass plant cell a nucleic acid having at least 70% sequence identity to Ulp1, wherein Ulp1 encodes a functional deSUMOylating protease capable of deSUMOylating a polypeptide encoded by the nucleic acid having at least 70% sequence identity with SEQ ID NO: 2 (OsNAM_{12.1}).

[0028] In another particular aspect described herein, is a transgenic plant cell comprising: a) at least one promoter that is functional in plants; and b) at least one nucleic acid having a sequence identity selected from the group consisting of: at least 70% identity; at least 75% identity; at least 80% identity; at least 85% identity; at least 90% identity; at least 95% identity; at least 96% identity; at least 97% identity; at least 98% identity; at least 99% identity; and 100% identity with one or more nucleic acids of the group of nucleic acids consisting of: SEQ ID NO: 2 (OsNAM_{12.1}); SEQ ID NO: 3 (OsGPDP_{12.1}); SEQ ID NO: 4 (OsGPDP_{12.1}); SEQ ID NO: 5 (OsGPDP_{12.1}); SEQ ID NO: 6 (OsSTPK_{12.1}); SEQ ID NO: 7 (OsSTPK_{12.1}); SEQ ID NO: 8 (OsSTPK_{12.1}); SEQ ID NO: 9 (OsPOle_{12.1}); SEQ ID NO: 10 (OsMtN3_{12.1}); SEQ ID NO: 11 (OsWAK_{12.1}); SEQ ID NO: 12 (OsCesA_{12.1}); SEQ ID NO: 13 (OsGDP_{12.1}); SEQ ID NO: 14 (OsARF_{12.1}); SEQ ID NO: 15 (OsARF_{12.1}); SEQ ID NO: 16 (OsARF_{12.1}); SEQ ID NO: 17 (OsARF_{12.1}); SEQ ID NO: 18 (OsARF_{12.1}); SEQ ID NO: 20 (OsAmh_{12.1}); and SEQ ID NO: 21 (OsAmh_{12.1}), wherein the promoter and polynucleotide are operably linked and incorporated into the plant cell chromosomal DNA.

[0029] In another embodiment described herein, a transgenic plant cell further comprising a nucleic acid having at least 70% sequence identity to Ulp1, wherein Ulp1 encodes a functional deSUMOylating proteas capable of deSUMOylating a polypeptide encoded by the nucleic acid having at least 70% sequence identity with SEQ ID NO: 2 (OsNAM_{12.1}).

[0030] In yet another aspect described herein, a transgenic plant cell is a plant cell selected from the group consisting of: rice plant cell; corn plant cell; wheat plant cell; barley plant cell; sorghum plant cell; millet plant cell; oats plant cell; and rye plant cell. In another embodiment, he plant cell is homozygous for the at least one nucleic acids.

[0031] In another embodiment described herein, is a transgenic plant comprising a plurality of transgenic plant cells described herein.

[0032] In another particular aspect described herein, is a transgenic plant comprising: a) at least one promoter that is functional in plants; and b) at least one nucleic acid having a sequence identity selected from the group consisting of: at least 70% identity; at least 75% identity; at least 80% identity; at least 85% identity; at least 90% identity; at least 95% identity; at least 96% identity; at least 97% identity; at least 98% identity; at least 99% identity; and 100% identity with one or more nucleic acids of the group of nucleic acids consisting of: SEQ ID NO: 2 (OsNAM_{12.1}); SEQ ID NO: 3 (OsGPDP_{12.1}); SEQ ID NO: 4 (OsGPDP_{12.1}); SEQ ID NO: 5 (OsGPDP_{12.1}); SEQ ID NO: 6 (OsSTPK_{12.1}); SEQ ID NO: 7 (OsSTPK_{12.1}); SEQ ID NO: 8 (OsSTPK_{12.1}); SEQ ID NO: 9 (OsPOle_{12.1}); SEQ ID NO: 10 (OsMtN3_{12.1}); SEQ ID NO: 11 (OsWAK_{12.1}); SEQ ID NO: 12 (OsCesA_{12.1}); SEQ ID NO: 13 (OsGDP_{12.1}); SEQ ID NO: 14 (OsARF_{12.1}); SEQ ID NO: 15 (OsARF_{12.1}); SEQ ID NO: 16 (OsARF_{12.1}); SEQ ID NO: 17 (OsARF_{12.1}); SEQ ID NO: 18 (OsARF_{12.1}); SEQ ID NO: 20 (OsAmh_{12.1}); and SEQ ID NO: 21 (OsAmh_{12.1}), wherein the promoter and polynucleotide are operably linked and incorporated into the plant cell chromosomal DNA.

[0033] In certain embodiments described herein, is a transgenic plant homozygous for the at least one nucleic acid. In another embodiment, is a seed of a transgenic plant described herein. In yet another embodiment is a plant part of a transgenic plant described herein.

[0034] In another particular aspect described herein, is a method for selecting transgenic plants having improved lateral root growth and water uptake relative to a control plant, comprising: a) screening a population of plants for increased lateral root growth and water uptake, wherein plants in the population comprise a transgenic plant cell having recombinant DNA incorporated into its chromosomal DNA, wherein the recombinant DNA comprises a promoter that is functional in a plant cell and that is functionally linked to an open reading frame of a nucleic acid having a sequence identity selected from the group consisting of: at least 70% identity; at least 75% identity; at least 80% identity; at least 85% identity; at least 90% identity; at least 95% identity; at least 96% identity; at least 97% identity; at least 98% identity; at least 99% identity; and 100% identity with one or more nucleic acids of the group of nucleic acids consisting of: SEQ ID NO: 2 (OsNAM_{12.1}); SEQ ID NO: 3 (OsGPDP_{12.1}); SEQ ID NO: 4 (OsGPDP_{12.1}); SEQ ID NO: 5 (OsGPDP_{12.1}); SEQ ID NO: 6 (OsSTPK_{12.1}); SEQ ID NO: 7 (OsSTPK_{12.1}); SEQ ID NO: 8 (OsSTPK_{12.1}); SEQ ID NO: 9 (OsPOle_{12.1}); SEQ ID NO: 10 (OsMtN3_{12.1}); SEQ ID NO: 11 (OsWAK_{12.1}); SEQ ID NO: 12 (OsCesA_{12.1}); SEQ ID NO: 13 (OsGDP_{12.1}); SEQ ID NO: 14 (OsARF_{12.1}); SEQ ID NO: 15 (OsARF_{12.1}); SEQ ID NO: 16 (OsARF_{12.1}); SEQ ID NO: 17 (OsARF_{12.1}); SEQ ID NO: 18 (OsARF_{12.1}); SEQ ID NO: 20 (OsAmh_{12.1}); and SEQ ID NO: 21 (OsAmh_{12.1}), wherein individual plants in said population that comprise the transgenic plant cell exhibit increased yield under drought conditions relative to control plants which do not comprise the transgenic plant cell; and b) selecting from said population one or more plants that exhibit lateral root growth and water uptake greater than the lateral root growth and water uptake in control plants which do not comprise the transgenic plant cell.

[0035] In another embodiment described herein, the method for selecting transgenic plants having improved lateral root growth and water uptake relative to a control plant further comprises selecting one or more plants that exhibit increased yield under drought conditions at a level greater than the yield under drought conditions in control plants that do not comprise the transgenic plant cell. In another aspect described herein, the method for selecting transgenic plants having improved lateral root growth and water uptake relative to a control plant further comprises a step of collecting seed from the one or more selected plants.

[0036] In particular example described herein, is a method of improving lateral root growth and water uptake in a cereal grass plant comprising modifying a nucleic acid encoding no-apical meristem (NAM) transcription factor in a cereal grass so that the nucleic acid encoding the NAM transcription factor shares an identity with SEQ ID NO: 2 (OsNAM₁₂) selected from the group consisting of: at least 90% identity; at least 95% identity; at least 96% identity; at least 97% identity; at least 98% identity; at least 99% identity; and 100% identity. In another embodiment, this method further comprises modifying one or more nucleic acids encoding one or more genes selected from the group consisting of GPDP; STPK; POle; MtN3; WAK, CesA; GDP; ARF; and Amh so that the one or more nucleic acids share an identity selected from the group consisting of: at least 95% identity; at least 96% identity; at least 97% identity; at least 98% identity; at least 99% identity; and 100% identity with one or more nucleic acids of the group of nucleic acids consisting of: SEQ ID NO: 3 (OsGPDP_{12.1}); SEQ ID NO: 4 (OsGPDP_{12.1}); SEQ ID NO: 5 (OsGPDP_{12.1}); SEQ ID NO: 6 (OsSTPK_{12.1}); SEQ ID NO: 7 (OsSTPK_{12.1}); SEQ ID NO: 8 (OsSTPK_{12.1}); SEQ ID NO: 9 (OsPOle_{12.1}); SEQ ID NO: 10 (OsMtN3_{12.1}); SEQ ID NO: 11 (OsWAK_{12.1}); SEQ ID NO: 12 (OsCesA_{12.1}); SEQ ID NO: 13 (OsGDP_{12.1}); SEQ ID NO: 14 (OsARF_{12.1}); SEQ ID NO: 15 (OsARF_{12.1}); SEQ ID NO: 16 (OsARF_{12.1}); SEQ ID NO: 17 (OsARF_{12.1}); SEQ ID NO: 18 (OsARF_{12.1}); SEQ ID NO: 20 (OsAmh_{12.1}); and SEQ ID NO: 21 (OsAmh_{12.1}). In another embodiment, the cereal grass comprises a nucleic acid comprising qDTY_{2.3}. In yet another embodiment, this method of improving lateral root growth and water uptake in a cereal grass plant, modifying the nucleic acid is performed using a technique selected from the group consisting of: transgenic method; crossing; backcrossing; protoplast fusion; doubled haploid technique; embryo rescue; zinc-finger nucleases; transcription activator-like effector nucleases; and clustered regularly interspaced short palindromic repeat (CRISPR)/Cas-based RNA-guided DNA endonucleases.

### BRIEF DESCRIPTION OF THE FIGURES

[0037] The patent or application file contains at least one drawing executed in color. Copies of this patent or patent application publication with color drawing(s) will be provided by the Office upon request and payment of the necessary fee.

[0038] FIG. 1A: Line graph showing yield and panicle branching results for qDTY_{12.1} NILs. Data show an additive effect of qDTY_{12.1} QTL+ and QTL− lines for grain yield over Vandana under varying severity of drought stress in six experiments conducted over three seasons at IRRI.

[0039] FIG. 1B: Photographs showing yield and panicle branching results for qDTY_{12.1} NILs. Increased panicle branching occurred in the NIL 481-B.

[0040] FIG. 1C: Bar graph showing yield and panicle branching results for qDTY_{12.1} NILs. Quantitative results are shown for increased panicle branching, total spikelets and spikelet fertility. Two to three panicles were sampled from 10 plants each of Vandana and 481-B.

[0041] FIGS. 2A-2D: Graphs showing morpho-physiological characters of qDTY_{12.1} NILs. The drought response of qDTY_{12.1} reflects drought-induced transpiration efficiency coupled with greater water uptake during reproductive stage drought due to increased lateral root growth qDTY_{12.1}. Nits showed higher transpiration efficiency according to FIG. 2A) carbon isotope discrimination in the youngest leaves sampled every 2 weeks during the drought stress period in the field (2012DS); FIG. 2B) instantaneously by gas exchange (photosynthesis rate/stomatal conductance; 2012WS); FIG. 2C) gravimetrically in a greenhouse seedling-stage study; and FIG. 2D) by soil moisture measurements in which 481-B showed more conservative water uptake patterns than Vandana during vegetative stage and higher water uptake during reproductive stage at a 40 cm depth (2012DS).

[0042] FIGS. 2E-2F: Photographs showing morpho-physiological characteristics of qDTY_{12.1} NIL 481-B. FIG. 2E) a higher proportion of lateral roots in 481-B than in Vandana; and FIG. 2F) increased LRN in vitro compared with Vandana.

[0043] FIG. 3A: A heat map showing the relative expression of candidate genes in root, leaf & panicles in NILs compared to Vandana during severe reproductive stage DC.

[0044] FIG. 3B: A bar graph representing qRT-PCR expression analysis of the five putative target CGs of OsNAM_{12.1}.

[0045] FIG. 3C: Photograph of EMSA for CG promoter binding by OsNAM_{12.1}. Lane 1, Negative control of DNA without the protein; Lane 2 DNA with GST protein, Lane 3 to 6 DNA with OsGDP_{12.1}, OsNOD_{12.1}, OsCesA_{12.1}, and OsNAM_{12.1} respectively.

[0046] FIG. 4A: Table showing characteristics of the parental rice varieties used.

[0047] FIG. 4B: Flow chart showing the marker assisted backcrossing (MAB) strategy for simultaneous fine mapping and development of NILs of recipient parent Vandana with fine-mapped segment of qDTY_{12.1}.

[0048] FIG. 5: Graphical genotype of IR84984-83-15-481-B (BC₂F₃) showing recipient genome recovery in the background and length of QTL region transferred.

[0049] FIG. 6A: Photographs of donor parent WayRarem (WR), recipient parent Vandana (V), and qDTY_{12.1} positive NIL IR84984-83-15-481-B (481-B) under drought. The NIL 481-B shows filled panicles while the other two do not.

[0050] FIG. 6B: Photographs showing grain type similarity between V and 481-B.

[0051] FIG. 6C: Line graph showing grain yield data from 11 trials over three years for yield.

[0052] FIGS. 7A-7C: FIG. 7A) Two NILs showed improved performance over Vandana in seedling stage trials for drought tolerance as measure by shoot biomass. FIGS. 7B) and 7C) NIL 481-B showed more root branching in seedlings in the greenhouse under drought conditions.

[0053] FIGS. 8A-8C: The qDTY_{12.1} NILs did not show different transpiration efficiency (TE) than Vandana under well-watered conditions according to FIG. 8A) successive carbon isotope discrimination measurements on the 3 youngest leaves in the field (DS), FIG. 8B) gravimetrically in the greenhouse, and FIG. 8C) instantaneously by gas exchange in the field (WS). Significant differences between +QTL and −QTL lines are indicated by a “**” for p<0.01 and “*” for p<0.05.

[0054] FIGS. 8D-8G: Additional seasons of data for the TE and root traits observed for qDTY_{12.1}: carbon isotope discrimination in FIG. 8D) drought stress and FIG. 8E) well-watered conditions (WS); FIG. 8F) genotypic differences in soil moisture levels (2012WS); FIG. 8G) Differences in root distribution among diameter classes as a proportion of total root length at a soil depth of 30-45 cm (2010DS). Significant differences between +QTL and −QTL lines are indicated by a “**” for p<0.01 and “*” for p<0.05.

[0055] FIG. 9A: Comparison of the QTL region in the Nipponbare and 9311 genomes.

[0056] FIG. 9B: Schematic representation of the relative position of the CG along the QTL.

[0057] FIG. 9C: Results for Southern hybridization of the OsCesA_{12.1} probe on genomic DNA of NB, WayRarem, +21, +83, −21, −83 and V (1-7). Plasmid DNA containing the OsCesA_{12.1} fragment was used as a positive control (P). Arrow indicates the 2.7 kb fragment absent in V, −21 & −83 but present in NB, WayRarem, +21 and +83.

[0058] FIG. 10A: Schematic of the different regions of the OsNAM_{12.1} protein from the N-terminal to the C-terminal: dimerization domain (DD), DNA binding domain (DBD), transactivation domain (TAD) and the position of the PEST motif that facilitates proteasome or calpain mediated protein cleavage. Numbers represent the amino acid position.

[0059] FIG. 10B: Primary amino acid sequence comparison between Vandana (SEQ ID NO: 182) and WayRarem (SEQ ID NO: 183) showing the three mutations encircled. The red arrows indicate potential SUMOylation sites and the blue arrow indicates the phosphorylation site change. The underlined region indicates the PEST sequence.

[0060] FIG. 10C: The effect of the AA differences on the 3D structure of Vanadana (V) and WayRarem (WR).

[0061] FIG. 10D: Schematic differences in drought responsive promoter cis-elements in the additional promoter sequence present in WR.

[0062] FIG. 11A-11B: Characteristics of transgenic plants I-OsNAM_{12.1}^{ox}. FIG. 11A) Photograph showing an increase in lateral root growth under PEG simulated water deficit in the three transgenic events of I-OsNAM_{12.1}^{ox} seedlings in vitro. FIG. 11B) Bar graph showing quantitative difference in LR between the three events compared to WT IR64.

[0063] FIGS. 11C-11D: Characteristics of transgenic plants I-OsNAM_{12.1}^{ox}. FIG. 11C) Photograph showing an increase in panicle branching under PEG simulated water deficit. FIG. 11D) Quantitative difference in panicle branching between the three events compared to WT IR64.

[0064] FIG. 11E: Characteristics of transgenic plants I-OsNAM_{12.1}^{ox}. Line graph showing gas exchange measurements (LICOR-6400) whereby transgenic events showed higher transpiration rates under drought stress.

[0065] FIG. 11F: Characteristics of transgenic plants I-OsNAM_{12.1}^{ox}. Bar graph showing field comparison between WT IR64 and I-OsNAM_{12.1}^{ox} as seen through number of spikelets and filled spikelets under drought.

[0066] FIGS. 12A-12B: FIG. 12A) Panel showing that plants mutated for the particular CGs led to higher lateral root growth than the WT. FIG. 12B) table showing percentage increase in LR in the mutants. Three to five tubes were sampled for each mutant and WT.

[0067] FIGS. 13A-13B: EMSA and SUMOylation results for OsNAM_{12.1}. FIG. 12A) EMSA for CG promoter binding by OsNAM_{12.1}. Lane 1, negative control of OsGDP_{12.1} promoter DNA without the protein; Lane 2 negative control OsGDP_{12.1} promoter DNA with GST protein, which was part of the recombinant OsNAM_{12.1} protein; Lanes 3 to 6, respective promoter DNA of OsGDP_{12.1}, OsNOD_{12.1}, OsCesA_{12.1}, and OsARF_{12.1} showing binding to the recombinant OsNAM_{12.1} through band shift represented by the white arrowheads. FIG. 12B) An immunoblot using anti-NAM antibody from rabbit shows higher M_{w} bands of OsNAM_{12.1.} (Lanes 1-5: Vandana, WayRarem, NIL, WT-IR64 & I-OsNAM_{12.1}^{ox}).

[0068] FIG. 13C: An immunoblot showing the action of deSUMoylating protease Ulp1 on the di-sumoylated OsNAM_{12.1} (˜53 kDa). The column graph shows the subsequent deSUMOylation of di-SUMOylated form and progressive accumulation of mono-SUMOylated (˜41 kDa) OsNAM_{12.1}.

[0069] FIG. 13D: SUMO protein interaction with recombinant OsNAM_{12.1}. Lane 1 Marker; Lane 2, SUMO1; Lane 3, SUMO2; Lane 4, SUMO3; P is positive control, N is negative control and NAM is untreated NAM.

[0070] FIG. 13E: 2D-immunoblot result for deSUMOylation with Ulp1 shows clear changes in spots marked with arrows, after the enzyme treatment.

[0071] FIG. 13F: 2D-immunoblot successively on the same blot with anti-NAM and anti-SUMO antibody shows identical spots confirming in vivo SUMOylation of the NAM protein.

[0072] FIG. 14: The effect of OsNAM_{12.1} on in vitro root phenotype of different genotypes.

[0073] FIG. 15: Haplotype Structure at OsNAM12.1. Figure depicts SNP calls from the 125 genomes data across the LOC_Os12g29330.1 locus, including the 5′ and 3′ untranslated region (UTR). Seven major haplotypes were identified by clustering the domesticated varieties at both synonymous and non-synonymous SNPs that differ from the Nipponbare reference genome. The temperate japonica subpopulation is comprised of one haplotype, while the indica, aus, tropical japonica, and aromatic subpopulations each have two haplotypes (labeled along the y-axis of the graph). Nipponbare SNPs are labeled in dark blue. Synonymous SNPs that differ from the reference genome are labeled in white. Four Non-synonymous SNPs were identified within the coding sequence. Two of these non-synonymous SNPs are highly prevalent within the indica subpopulation (labeled yellow), and are present within WayRarem. The other two non-synonymous SNPs identified are relatively rare within this collection of germplasm, only appearing three times within all 125 genetic lines (labeled red). Missing SNP calls are labeled with a double period (..).

[0074] FIG. 16A: SSR marker and CG-allele based genotyping of Intra-QTL recombinant lines.

[0075] FIG. 16B: Effect on root growth under presence/absence of genetic regions in IQRLs.

[0076] FIG. 16C: Field-based yield data on line 937-B and 917-B. The colored numbers represent highest yield.

[0077] FIG. 17: Field performance and grain characteristics of BC₂F_{3:4} and BC₃F_{3:7} NILs, parents, and drought-tolerant checks in advanced yield trials under upland severe stress and non-stress conditions with respective percentage recovery of Vandana allele in the background (% BG).

[0078] FIGS. 18A-18B: Fine mapping results. FIG. 17A) Top—Using five SSR markers RM28099, RM28130, RM511, RM1261 and RM28166 represented as alphabets respectively or Bottom—the nine candidate genes OsGPDP_{12.1}, OsAmH_{12.1} OsPOLe_{12.1} OsMtN3_{12.1}, OsCesA_{12.1}, OSNAM_{12.1}, OsGDP_{12.1}, OsWAK_{12.1} and OsARF_{12.1} represented as numerals 1-9 respectively on the x-axis. FIG. 187B) In qDTY_{12.1} recombinant plants, yield was reduced as the percentage of WR alleles decreased.

[0079] FIG. 19A-19F: Heat map style representation of the observation that higher the number of WayRarem alleles of markers (genes) along qDTY_{12.1}, better the yield. The figure represents raw data for yield (Y-axis-right; Kg/h) in different recombinant lines (Y-axis-left) containing markers (X-axis top) for Vandana (yellow), WayRarem (Green) and heterozygote (light green) alleles under no stress (FIG. 19A), mild stress (FIG. 19B), moderate stress (FIG. 19C), severe stress-I (FIG. 19D), severe stress-II (FIG. 19E). The sixth panel (FIG. 19F) represents percent yield loss under the two severe stress conditions combined.

[0080] FIGS. 20A-20B: Differences between Vandana and WayRarem in the potential post-translational modification of OsNAM_{12.1} in FIG. 20A) SUMOylation and FIG. 20B) phosphorylation sites. Figures disclose SEQ ID NOS 182, 184-187, 183-184, 187, and 186, respectively, in order of appearance.

[0081] FIGS. 21A-21C: Differences in LRN and SUMOylation of OsNAM_{12.1} in different plant lines. FIG. 21A) 2D-immunodetection of OsNAM_{12.1} SUMOylation pattern under drought in various plant lines. The arrows indicate spots that are substantially reduced under drought in the tolerant lines of 481-B, WR50-6-B4 (2.3), V-OsNAM_{12.1}^{ox} (V-Ox) and I-OsNAM_{12.1}^{ox} (IR-Ox) but not in Vandana or WayRarem. Multiple spots are most likely the various combinations of multiple phosphorylation and SUMOylation of OsNAM_{12.1}. FIG. 21B) The effect of OsNAM_{12.1} on in vitro root phenotype of different ‘genotypes’. FIG. 21C) 3D scatterplot for total root length, maximum root depth and root surface area of Vandana, WayRarem, V-OsNAM_{12.1}^{ox}, 481-B, and WR-50-6-B4 plants at 15 days after germination. Data was collected with ImageJ root analyzer from 8 to 15 seedlings under normal and PEG-simulated drought conditions. Statistical analysis and graph plotting were performed using R software. Multiple stalks of a single color represent mean values for multiple samples within a ‘genotype’, which represent different SD within the group in the three root traits. A single stalk for 481-B in well-watered conditions is masked by one of the stalks of WayRarem indicating similar values of the two.

[0082] FIG. 22: Proteins related to cell growth and cell wall formation, along with amino acid metabolism in the roots during stress. Specific locus IDs in the MSU database are shown, along with the protein description and the comparative amounts in NILs compared to Vandana.

[0083] FIG. 23: Proteins related to glycolysis and the TCA cycle in the flag leaf, spikelets and roots during stress.

[0084] FIG. 24: Proteins related to carbohydrate metabolism, specifically sucrose and starch metabolism in the flag leaf and spikelets during stress. Specific locus IDs in the MSU database are shown, along with the protein description and the comparative amounts in the NILs compared to Vandana.

[0085] FIG. 25: Proteins related to photosynthesis and photorespiration in the flag leaf during stress. Specific locus IDs in the database are shown, along with the protein description and the comparative amounts in the NILs compared to Vandana.

[0086] FIG. 26: Proteins related to redox systems in the flag leaf during stress. Specific locus IDs in the MSU database are shown along with the protein description and the comparative amounts in the NILs compared to Vandana.

[0087] FIGS. 27A-27B: FIG. 28A) A Venn diagram depicting the unique and common proteins identified in all the three tissues from the parent Vandana and the 481-B during drought stress treatment. FIG. 28B) Percentage overview of the proteins mapped onto the gene ontologies through MapMan in flag leaf, spikelets and roots during stress represented as in the 481-B compared to Vandana.

[0088] FIGS. 28A-28L: Content of sugars and starch (FIGS. 28A-28D), N %-C/N ratio (FIGS. 28E-28F), free amino acids (FIGS. 28G-28J) and the quantitative PCR data of 3 phosphoglycerate dehydrogenase and aldehyde dehydrogenase (FIGS. 28K-28L) in the roots of the parents (Vandana and WayRarem) and the 481-B. Green bars represent the well-watered treatment (control) while red bars represent the drought (stress) treatment. The average measurement and standard error is shown for each of the samples (n=3).

[0089] FIGS. 29A-29D: Content of sugars and starch (FIGS. 29A-29D) in the flag leaf of the parents (Vandana and WayRarem) and the 481-B. Green bars represent the well-watered treatment (control) while red bars represent the drought (stress) treatment. The average measurement and standard error is shown for each of the samples (n=3).

[0090] FIGS. 30A-30G: Content of sugars and starch (FIGS. 30A-30D) and the quantitative PCR data of glucose-1-phosphate adenylyltransferase, sucrose synthase and adenylate kinase (FIGS. 30E-30G) in the spikelets of the parents (Vandana and WayRarem) and the 481-B. Green bars represent the well-watered treatment (control) while red bars represent the drought (stress) treatment. The average measurement and standard error is shown for each of the samples (n=3).

[0091] FIGS. 31A-31F: Content of total free amino acid in the spikelets (FIGS. 31A-31C) and in the flag leaf (FIGS. 31D-31F) of the parents (Vandana and WayRarem) and the 481-B. Green bars represent the well-watered treatment (control) while red bars represent the drought (stress) treatment.

[0092] FIGS. 32A-32E: Quantitative PCR data of pyrroline-5-carboxylate reductase and pyrroline-5-carboxylate synthase gene in the flag leaf (FIGS. 32A-32B), the roots (FIGS. 32C-32D) of the parents (Vandana and WayRarem) and the 481-B. Green bars represent the well-watered treatment (control) while red bars represent the drought (stress) treatment. The average measurement and standard error is shown for each of the samples (n=3). Colorimetric estimation of the proline content (FIG. 32E) in the parents (Vandana and WayRarem) and the 481-B under drought (stress) conditions. The average measurement and standard error is shown for each of the samples (n=3).

[0093] FIG. 33: Complete set of primers used for quantitative PCR analysis in Example 3 (SEQ ID NOS 188-197, respectively, in order of appearance).

[0094] FIGS. 34A-34F: Data representing the N %, C/N ratio and total free amino acid content in the flag leaf and the spikelets of the parents (Vandana and WayRarem) and the 481-B. Green bars represent the well-watered treatment (control) while red bars represent the drought treatment. The average measurement and standard error is shown for each of the samples (n=3).

[0095] FIGS. 35A-35B: Photosynthesis rate in which the 481B and Vandana showed no difference during control conditions, but during stress 481B had a lower photosynthesis rate than Vandana. The average measurement and standard error is shown for each of the samples (n=3).

[0096] FIG. 36: Transpiration efficiency in which the 481B showed better TE than Vandana during stress. The average measurement and standard error is shown for each of the samples (n=3).

[0097] FIG. 37: Stomatal conductance in which the 481B showed lower stomatal conductance than Vandana during stress. The average measurement and standard error is shown for each of the samples (n=3).

### DETAILED DESCRIPTION OF THE INVENTION

[0098] Throughout this disclosure, various publications, patents and published patent specifications are referenced. The disclosures of these publications, patents and published patent specifications are hereby incorporated by reference into the present disclosure to more fully describe the state of the art to which this invention pertains.

[0099] Drought killed 11 million and adversely affected two billion people in the last century. Expected climato-demography changes predict exacerbated drought scenarios. Rice, a food and livelihood crop for the poor inhabits drought prone areas. Accordingly, drought tolerant rice may alleviate poverty and hunger. Literature reporting drought tolerant rice has consequently increased. Yet, breeding lines, QTLs, genes or omics/networks-based attempts fall short of the tolerant landraces.

[0100] Generating drought tolerant rice genotypes is a highly desirable goal for hunger and poverty amelioration. Single gene transgenic approaches or QTL research have yet not resulted in tolerance levels better than in the available landraces. Disclosed herein are methods of improving upon the tolerance level of a commercial rice genotype through a QTL. This result is of future significance to rice farmers. Also disclosed is evidence that success with this QTL is due to a gene-complex of different genes co-localized at this region. These genes explained multiple morpho-physiological traits altered under drought. This is the first such validation. Ideally expected but rarely demonstrated, field- and lab-based results are corroborative.

[0101] The present invention provides methods and materials useful for improving lateral root growth, water uptake, and the yield of grain of cereal grasses grown under drought stress conditions.

### DEFINITIONS

[0102] “Yield” describes the amount of grain produced by a plant or a group, or crop, of plants. Yield can be measured in several ways, e.g. t ha⁻¹, average grain yield per plant.

[0103] As used herein, “drought stress” means a period of insufficient water supply for normal plant development and growth.

[0104] “Improved yield under drought stress” means an increase in the yield of a plant or a group, or crop, of plants compared to corresponding plant or a group, or crop, of plants.

[0105] As used herein a “phenotypic trait” is a distinct variant of an observable characteristic, e.g., yield under drought conditions, of a plant that may be inherited by a plant or may be artificially incorporated into a plant by processes such as transfection.

[0106] As used herein, “introgression” means the movement of one or more genes, or a group of genes, from one plant variety into the gene complex of another as a result of backcrossing.

[0107] As used herein a “plant cell” means a plant cell that is transformed with stably-integrated, non-natural, recombinant DNA, e.g. by Agrobacterium-mediated transformation, bombardment using microparticles coated with recombinant DNA, or other method, or by programmable site-specific nucleases, e.g. zinc-finger nucleases (ZFNs), transcription activator-like effector nucleases (TALENs), clustered regulator interspaced short palindromic repeat (CRISP)/Cas-based RNA-guided DNA endonucleases, or other nuclease. A plant cell of this invention can be an originally-transformed or nucleases-modified plant cell that exists as a microorganism or as a progeny plant cell that is regenerated into differentiated tissue, e.g. into a transgenic plant with stably-integrated, non-natural recombinant DNA, or seed or pollen derived from a progeny transgenic plant.

[0108] As used herein a “transgenic plant” means a plant whose genome has been altered by the stable integration of recombinant DNA. A transgenic plant includes a plant regenerated from an originally-transformed plant cell and progeny transgenic plants from later generations or crosses of a transformed plant.

[0109] As used herein “recombinant DNA” means DNA which has been a genetically engineered and constructed outside of a cell including DNA containing naturally occurring DNA or cDNA or synthetic DNA.

[0110] “Percent identity” describes the extent to which the sequences of DNA or protein segments are invariant throughout a window of alignment of sequences, for example nucleotide sequences or amino acid sequences. Percent identity is calculated over the aligned length preferably using a local alignment algorithm, such as BLASTp. As used herein, sequences are “aligned” when the alignment produced by BLASTp has a minimal e-value.

[0111] As used herein “promoter” means regulatory DNA for initializing transcription. A “promoter that is functional in a plant cell” is a promoter capable of initiating transcription in plant cells whether or not its origin is a plant cell, e.g. is it well known that Agrobacterium promoters are functional in plant cells. Thus, plant promoters include promoter DNA obtained from plants, plant viruses and bacteria such as Agrobacterium and Bradyrhizobium bacteria.

[0112] As used herein “operably linked” means the association of two or more DNA fragments in a recombinant DNA construct so that the function of one, e.g. protein-encoding DNA, is controlled by the other, e.g. a promoter.

[0113] As used herein “expressed” means produced, e.g. a protein is expressed in a plant cell when its cognate DNA is transcribed to mRNA that is translated to the protein.

[0114] As used herein a “control plant” means a plant that does not contain the recombinant DNA that imparts enhanced yield under drought stress. A control plant is used to identify and select a transgenic plant that has enhanced yield under drought stress. A suitable control plant can be a non-transgenic plant of the parental line used to generate a transgenic plant, i.e. devoid of recombinant DNA. A suitable control plant may in some cases be a progeny of a hemizygous transgenic plant line that does not contain the recombinant DNA, known as a negative segregant.

[0115] Recombinant DNA constructs are assembled using methods well known to persons of ordinary skill in the art and typically comprise a promoter operably linked to DNA, the expression of which provides the enhanced agronomic trait. Other construct components may include additional regulatory elements, such as 5′ leaders and introns for enhancing transcription, 3′ untranslated regions (such as polyadenylation signals and sites), DNA for transit or signal peptides.

[0116] Numerous promoters that are active in plant cells have been described in the literature. These include promoters present in plant genomes as well as promoters from other sources, including nopaline synthase (NOS) promoter and octopine synthase (OCS) promoters carried on tumor-inducing plasmids of Agrobacterium tumefaciens and the CaMV35S promoters from the cauliflower mosaic virus as disclosed in U.S. Pat. Nos. 5,164,316 and 5,322,938. Useful promoters derived from plant genes are found in U.S. Pat. No. 5,641,876 which discloses a rice actin promoter, U.S. Pat. No. 7,151,204 which discloses a maize chloroplast aldolase promoter and a maize aldolase (FDA) promoter, and US Patent Application Publication 2003/0131377 A1 which discloses a maize nicotianamine synthase promoter. These and numerous other promoters that function in plant cells are known to those skilled in the art and available for use in recombinant nucleic acids of the present invention to provide for expression of desired genes in transgenic plant cells.

[0117] Furthermore, the promoters may be altered to contain multiple “enhancer sequences” to assist in elevating gene expression. Such enhancers are known in the art. By including an enhancer sequence with such constructs, the expression of the selected protein may be enhanced. These enhancers often are found 5′ to the start of transcription in a promoter that functions in eukaryotic cells, but can often be inserted upstream (5′) or downstream (3′) to the coding sequence. In some instances, these 5′ enhancing elements are introns. Particularly useful as enhancers are the 5′ introns of the rice actin 1 (see U.S. Pat. No. 5,641,876) and rice actin 2 genes, the maize alcohol dehydrogenase gene intron, the maize heat shock protein 70 gene intron (U.S. Pat. No. 5,593,874) and the maize shrunken 1 gene. See also US Patent Application Publication 2002/0192813A1 which discloses 5′, 3′ and intron elements useful in the design of effective plant expression vectors.

[0118] The term “quantitative trait locus” or “QTL” refers to a polymorphic genetic locus with at least two alleles that reflect differential expression of a continuously distributed phenotypic trait.

[0119] The term “associated with” or “associated” in the context of this invention refers to, for example, a nucleic acid and a phenotypic trait, that are in linkage disequilibrium, i.e., the nucleic acid and the trait are found together in progeny plants more often than if the nucleic acid and phenotype segregated independently.

[0120] The term “marker” or “molecular marker” or “genetic marker” refers to a genetic locus (a “marker focus”) used as a point of reference when identifying genetically linked loci such as a quantitative trait locus (QTL). The term may also refer to nucleic acid sequences complementary to the genomic sequences, such as nucleic acids used as probes or primers. The primers may be complementary to sequences upstream or downstream of the marker sequences. The term can also refer to amplification products associated with the marker. The term can also refer to alleles associated with the markers. Allelic variation associated with a phenotype allows use of the marker to distinguish germplasm on the basis of the sequence.

[0121] The term “interval” refers to a continuous linear span of chromosomal DNA with termini defined by and including molecular markers.

[0122] The term “crossed” or “cross” in the context of this invention means the fusion of gametes via pollination to produce progeny (i.e., cells, seeds or plants). The term encompasses both sexual crosses (the pollination of one plant by another) and selling (self-pollination, i.e., when the pollen and ovule are from the same plant or from genetically identical plants).

[0123] The phrase “stringent hybridization conditions” refers to conditions under which a probe or nucleic acid will hybridize to its target subsequence, typically in a complex mixture of nucleic acids, but to essentially no other sequences. Stringent conditions are sequence-dependent and will be different in different circumstances. Longer sequences hybridize specifically at higher temperatures. An extensive guide to the hybridization of nucleic acids is found in Thijssen (Thijssen, 1993). Generally, stringent conditions are selected to be about 5-10° C. lower than the thermal melting point (Tm) for the specific sequence at a defined ionic strength pH. The Tm is the temperature (under defined ionic strength, pH, and nucleic acid concentration) at which 50% of the probes complementary to the target hybridize to the target sequence at equilibrium (as the target sequences are present in excess, at Tm, 50% of the probes are occupied at equilibrium). Stringent conditions will be those in which the salt concentration is less than about 1.0 M sodium ion, typically about 0.01 to 1.0 M sodium ion concentration (or other salts) at pH 7.0 to 8.3 and the temperature is at least about 30° C. for short probes (e.g., 10 to 50 nucleotides) and at least about 60° C. for long probes (e.g., greater than 50 nucleotides). Stringent conditions may also be achieved with the addition of destabilizing agents such as formamide. For selective or specific hybridization, a positive signal is at least two times background, preferably 10 times background hybridization. Exemplary stringent hybridization conditions are often: 50% formamide, 5×SSC, and 1% SDS, incubating at 42° C., or, 5×SSC, 1% SDS, incubating at 65° C., with wash in 0.2×SSC, and 0.1% SDS at 65° C. For PCR, a temperature of about 36° C. is typical for low stringency amplification, although annealing temperatures may vary between about 32° C. and 48° C. depending on primer length. Additional guidelines for determining hybridization parameters are provided in numerous references, e.g. Current Protocols in Molecular Biology, eds. Ausubel, et al. 1995).

[0124] General Description

[0125] Preferably, a QTL of the present invention comprises at least one marker associated with the QTL of the present invention selected from the group consisting of: RM28048 (forward primer: SEQ ID NO: 22; reverse primer: SEQ ID NO: 23); RM28076 (forward primer: SEQ ID NO: 24; reverse primer: SEQ ID NO: 25); RM28089 (forward primer: SEQ ID NO: 26; reverse primer: SEQ ID NO: 27); RM28099 (forward primer: SEQ ID NO: 28; reverse primer: SEQ ID NO: 29); RM28130 (forward primer: SEQ ID NO: 30; reverse primer: SEQ ID NO: 31); RM511 (forward primer: SEQ ID NO: 32; reverse primer: SEQ ID NO: 33); RM1261 (forward primer: SEQ ID NO: 34; reverse primer: SEQ ID NO: 35); RM28166 (forward primer: SEQ ID NO: 36; reverse primer: SEQ ID NO: 37); RM28199 (forward primer: SEQ ID NO: 38; reverse primer: SEQ ID NO: 39); and Indel-8 (forward primer: SEQ ID NO: 60; reverse primer: SEQ ID NO: 61). Because the nucleic acid sequence of the QTL that is responsible for conferring the improved yield under drought stress may only be a fraction of the entire QTL herein identified, the markers indicate linked inheritance of genetic regions or the absence of observed recombination within such genetic regions. Therefore, it is noted that the markers listed herein indicate the chromosomal region where a QTL of the invention is located in the genome of the specified rice varieties and that those markers do not necessarily define the boundaries or the structure of that QTL. Thus, the part of the QTL that comprises the essential yield-improving nucleic acid sequence(s) may be considerably smaller than that indicated by the contiguous markers listed for a particular QTL. Such a part is herein referred to as a “yield-improving part” of a QTL. As a result, a yield-improving part of a QTL need not necessarily comprise any of the listed markers. Also, other markers may be used to indicate the various QTLs, provided that such markers are genetically linked to the QTLs.

[0126] A yield-improving part of a QTL for improving yield under drought stress in cereal grasses may be identified by using a molecular marker technique, for instance, with one or more of the markers for a QTL disclosed herein as being linked to said QTL, preferably in combination with a yield bioassay. Cereal grass plants that do not comprise a yield-improving part of a QTL of the present invention have a relatively lower yield. The markers provided by the present invention may be used for detecting the presence of one or more QTLs of the invention in a cereal grass plant suspected of having improved yield under drought stress, and may therefore be used in methods involving marker-assisted breeding and selection of cereal grass plants having improved yield under drought stress. Preferably, detecting the presence of a QTL of the invention is performed with at least one of the markers for a QTL described herein as being linked to the QTL. The present invention therefore relates in another aspect to a method for detecting the presence of a QTL for improved yield under drought stress, comprising detecting the presence of a nucleic acid sequence of the QTL in a cereal grass plant suspected of having improved yield under drought stress, wherein the presence of the nucleic acid sequence may be detected by the use of the said markers.

[0127] The nucleic acid sequence of a QTL of the present invention may be determined by methods known to the skilled person. For instance, a nucleic acid sequence comprising the QTL or a yield-improving part thereof may be isolated from a donor plant by fragmenting the genome of said plant and selecting those fragments harboring one or more markers indicative of the QTL. Subsequently, or alternatively, the marker sequences (or parts thereof) indicative of the QTL may be used as PCR amplification primers, in order to amplify a nucleic acid sequence comprising said QTL from a genomic nucleic acid sample or a genome fragment obtained from said plant. The amplified sequence may then be purified in order to obtain the isolated QTL. The nucleotide sequence of the QTL, and/or of any additional markers comprised therein, may then be obtained by standard sequencing methods.

[0128] The present invention therefore also relates to an isolated nucleic acid (preferably DNA) sequence that comprises a QTL of the present invention, or a yield-improving part thereof. Thus, the markers that pinpoint the various QTLs described herein may be used for the identification, isolation and purification of one or more genes from cereal that encode for yield improvement under drought stress.

[0129] The nucleotide sequence of a QTL of the present invention may, for instance, also be resolved by determining the nucleotide sequence of one or more markers associated with the QTL and designing internal primers for the marker sequences that may then be used to further determine the sequence of the QTL outside of the marker sequences. For instance, the nucleotide sequence of the markers disclosed herein may be obtained by isolating the markers from the electrophoresis gel used in the determination of the presence of the markers in the genome of a subject plant, and determining the nucleotide sequence of the markers by, for instance, dideoxy chain terminating methods, which are well known in the art.

[0130] In embodiments of such methods for detecting the presence of a QTL in a cereal grass plant, the method may also comprise the steps of providing a oligonucleotide or nucleic acid capable of hybridizing under stringent hybridization conditions to a nucleic acid sequence of a marker linked to the QTL, preferably selected from the markers disclosed herein as being linked to said QTL, contacting the oligonucleotide or nucleic acid with a genomic nucleic acid of a cereal grass plant suspected of possessing relatively higher yield during drought stress, and determining the presence of specific hybridization of the oligonucleotide or nucleic acid to said genomic nucleic acid. Preferably, said method is performed on a nucleic acid sample obtained from the cereal grass plant suspected of possessing relatively higher yield during drought, although in situ hybridization methods may also be employed. Alternatively, and in a more preferred embodiment, the skilled person may, once the nucleotide sequence of the QTL has been determined, design specific hybridization probes or oligonucleotides capable of hybridizing under stringent hybridization conditions to the nucleic acid sequence of said QTL and may use such hybridization probes in methods for detecting the presence of a QTL of the invention in a cereal grass plant suspected of possessing relatively higher yield during drought stress.

[0131] Production of Cereal Grass Plants with Improved Yield under Drought Stress by Transgenic Methods.

[0132] According an aspect of the present invention, a nucleic acid (preferably DNA) sequence comprising at least one QTL of the present invention or a yield-improving part thereof, may be used for the production of a cereal grass plant with improved yield under drought stress. In this aspect, the invention provides for the use of a QTL of the present invention or yield-improving parts thereof, for producing a cereal grass plant with improved yield under drought stress, which use involves the introduction of a nucleic acid sequence comprising said QTL in a cereal grass plant having relatively low yield under drought stress. As stated, said nucleic acid sequence may be derived from a suitable donor cereal grass plant. Suitable donor rice plants capable of providing a nucleic acid sequence comprising at least one of the hereinbefore described QTLs, or yield-improving parts thereof, are WayRarem, and the WayRarem-derived hybrids IR74371-46-1-1 and IR79971-B-102-B. Other related rice plants that exhibit relatively high yield under drought stress and comprise one or more genes that encode for improved yield under drought stress may also be utilized as donor plants as the present invention describes how this material may be identified.

[0133] Once identified in a suitable donor cereal grass plant, the nucleic acid sequence that comprises a QTL for improve yield under drought stress according to the present invention, or a yield-improving part thereof, may be transferred to a suitable recipient plant by any method available. In certain embodiments, a suitable recipient cereal grass plant is a rice plant that does not comprise a yield-improving QTL described herein, or a yield-improving part thereof, including but not limited to Vandana; Kalinga 3; Anjali; IR64; Swarna; Sambha Mahsuri; MTU1010, Lalat; Naveen; Sabitri; BR11; BR29; BR28; TDK1; TDK 9; and Chirang.

[0134] For instance, the said nucleic acid sequence may be transferred by crossing a donor cereal grass plant with a susceptible recipient cereal grass plant (i.e. by introgression), by transformation, by protoplast fusion, by a doubled haploid technique, by embryo rescue, or by any other nucleic acid transfer system, optionally followed by selection of offspring plants comprising the QTL and exhibiting improved yield under drought stress. For transgenic methods of transfer a nucleic acid sequence comprising a QTL for improved yield under drought stress according to the present invention, or a yield-improving part thereof, may be isolated from said donor plant by using methods known in the art and the thus isolated nucleic acid sequence may be transferred to the recipient plant by transgenic methods, for instance by means of a vector, in a gamete, or in any other suitable transfer element, such as a ballistic particle coated with said nucleic acid sequence.

[0135] Plant transformation generally involves the construction of an expression vector that will function in plant cells. In the present invention, such a vector comprises a nucleic acid sequence that comprises a QTL for improved yield under drought stress of the present invention, or a yield-improving part thereof, which vector may comprise a yield-improving gene that is under control of, or operatively linked to, a regulatory element such as a promoter. The expression vector may contain one or more such operably linked gene/regulatory element combinations, provided that at least one of the genes contained in the combinations encodes for improved yield under drought stress. The vector(s) may be in the form of a plasmid, and can be used alone or in combination with other plasmids to provide transgenic plants that have improved yield under drought stress, using transformation methods known in the art, such as the Agrobacterium transformation system.

[0136] Expression vectors may include at least one marker gene, operably linked to a regulatory element (such as a promoter) that allows transformed cells containing the marker to be either recovered by negative selection (by inhibiting the growth of cells that do not contain the selectable marker gene), or by positive selection (by screening for the product encoded by the marker gene). Many commonly used selectable marker genes for plant transformation are known in the art, and include, for example, genes that code for enzymes that metabolically detoxify a selective chemical agent which may be an antibiotic or a herbicide, or genes that encode an altered target which is insensitive to the inhibitor. Several positive selection methods are known in the art, such as mannose selection. Alternatively, marker-less transformation can be used to obtain plants without mentioned marker genes, the techniques for which are known in the art.

[0137] One method for introducing an expression vector into a plant is based on the natural transformation system of Agrobacterium. A. tumefaciens and A. rhizogenes are plant pathogenic soil bacteria that genetically transform plant cells. The Ti and Ri plasmids of A. tumefaciens and A. rhizogenes, respectively, carry genes responsible for genetic transformation of the plant. Methods of introducing expression vectors into plant tissue include the direct infection or co-cultivation of plant cells with Agrobacterium tumefaciens. Descriptions of Agrobacterium vectors systems and methods for Agrobacterium-mediated gene transfer are provided by Gruber and Crosby, 1993 and Moloney et al., 1989. See also, U.S. Pat. No. 5,591,616. General descriptions of plant expression vectors and reporter genes and transformation protocols and descriptions of Agrobacterium vector systems and methods for Agrobacterium-mediated gene transfer can be found in Gruber and Crosby, 1993. General methods of culturing plant tissues are provided, for example, by Miki et al., 1993 and by Phillips, et al., 1988. A reference handbook for molecular cloning techniques and suitable expression vectors is Sambrook and Russell (2001).

[0138] Another method for introducing an expression vector into a plant is based on microprojectile-mediated transformation wherein DNA is carried on the surface of microprojectiles. The expression vector is introduced into plant tissues with a biolistic device that accelerates the microprojectiles to speeds of 300 to 600 m/s which is sufficient to penetrate plant cell walls and membranes. Another method for introducing DNA to plants is via the sonication of target cells. Alternatively, liposome or spheroplast fusion has been used to introduce expression vectors into plants. Direct uptake of DNA into protoplasts using CaCl₂ precipitation, polyvinyl alcohol, or poly-L-ornithine may also be used. Electroporation of protoplasts and whole cells and tissues has also been described.

[0139] Following transformation of target tissues, expression of the above described selectable marker genes allows for preferential selection of transformed cells, tissues and/or plants, using regeneration and selection methods now well known in the art. The markers described herein may also be used for that purpose.

[0140] Production of Cereal Grass Plants with Improved Yield under Drought Stress by Programmable Site-Specific Nucleases.

[0141] Zinc-finger nucleases (ZFNs), transcription activator-like effector nucleases (TALENs), and clustered regularly interspaced short palindromic repeat (CRISPR)/Cas-based RNA-guided DNA endonucleases comprise a powerful class of tools useful in genome engineering. The chimeric nucleases of ZFNs and TALENs are composed of programmable, sequence-specific DNA-binding modules linked to a nonspecific DNA cleavage domain. ZFNs and TALENs enable a broad range of genetic modifications by inducing DNA double-strand breaks that stimulate error-prone non-homologous end joining or homology-directed repair at specific genomic locations.

[0142] Site-specific nucleases induce DNA double-strand breaks that stimulate non-homologous end joining and homology directed repair at targeted genomic loci. A thorough review of the ZFN, TALEN, and CRISPR/Cas-based RNA-guided DNA endonuclease is available (Gaj et al., 2013). Further discussion of ZNFs may be found in U.S. Pat. Nos. 8,106,255, 8,399,218, and 8,592,645. Further discussion of TALENs may be found in U.S. Pat. No. 8,697,853. Further discussion of CRISPR/Cas-based RNA-guided DNA endonucleases may be found in U.S. Pat. No. 8,697,359, and in J. D. Sander & J. K. Juong (2014).

[0143] In certain aspects, any one of these technologies (ZFNs, TALENs, and CRISPR/Cas-based RNA guided DNA endonucleases) may be used to modify the genome of a cereal grass plant. Such modification may include modification, insertion, or deletion of a QTL or one or more individual genes associated with improved lateral root growth, water uptake, and increased yield under drought conditions. For example, the Vandana genome, which already includes qDTY_{2.3}, or a functional part thereof, may be modified from the Vandana allele to the WayRarem allele at OsNAM_{12.1}.

[0144] Production of Cereal Grass Plants with Improved Yield under Drought Stress by Non-Transgenic Methods.

[0145] In an alternative embodiment for producing a cereal grass plant with improved yield under drought stress, protoplast fusion can be used for the transfer of nucleic acids from a donor plant to a recipient plant. Protoplast fusion is an induced or spontaneous union, such as a somatic hybridization, between two or more protoplasts (cells of which the cell walls are removed by enzymatic treatment) to produce a single bi- or multi-nucleate cell. The fused cell, which may even be obtained with plant species that cannot be interbred in nature, is tissue cultured into a hybrid plant exhibiting the desirable combination of traits. More specifically, a first protoplast can be obtained from a cereal grass plant or other plant line that exhibits improved yield under drought stress. For example, a protoplast from rice WayRarem can be used. A second protoplast can be obtained from rice or other plant variety, preferably a variety that comprises commercially desirable characteristics, such as, but not limited to disease resistance, insect resistance, weed resistance, etc. The protoplasts are then fused using traditional protoplast fusion procedures, which are known in the art.

[0146] Alternatively, embryo rescue may be employed in the transfer of a nucleic acid comprising one or more QTLs of the present invention from a donor plant to a recipient plant. Embryo rescue can be used as a procedure to isolate embryo's from crosses wherein plants fail to produce viable seed. In this process, the fertilized ovary or immature seed of a plant is tissue cultured to create new plants (Pierik, 1999).

[0147] The present invention also relates to a method of producing a cereal grass plant having improved yield under drought stress comprising the steps of performing a method for detecting the presence of a quantitative trait locus (QTL) associated with improved yield under drought stress in a donor cereal grass plant according to invention as described above, and transferring a nucleic acid sequence comprising at least one QTL thus detected, or a yield-improving part thereof, from said donor plant to a cereal grass plant having a relatively lower yield under drought stress. The transfer of said nucleic acid sequence may be performed by any of the methods previously described herein.

[0148] A preferred embodiment of such a method comprises the transfer by introgression of said nucleic acid sequence from a cereal grass plant having improved yield under drought stress into a cereal grass plant having a relatively lower yield under drought stress by crossing said plants. This transfer may thus suitably be accomplished by using traditional breeding techniques. QTLs are preferably introgressed into commercial cereal grass varieties by using marker-assisted breeding (MAS). Marker-assisted breeding or marker-assisted selection involves the use of one or more of the molecular markers for the identification and selection of those offspring plants that contain one or more of the genes that encode for the desired trait. In the present instance, such identification and selection is based on selection of QTLs of the present invention or markers associated therewith. MAS can also be used to develop near-isogenic lines (NIL) harboring the QTL of interest, allowing a more detailed study of each QTL effect and is also an effective method for development of backcross inbred line (BIL) populations (see, e.g., Nesbitt et al., 2001; van Berloo et al., 2001). Cereal grass plants developed according to this preferred embodiment can advantageously derive a majority of their traits from the recipient plant, and derive improved yield under drought stress from the donor plant.

[0149] As discussed briefly above, traditional breeding techniques can be used to introgress a nucleic acid sequence encoding for improved yield under drought stress into a recipient cereal grass plant having a relatively lower yield under drought stress. In one method, which is referred to as pedigree breeding, a donor cereal grass plant comprising a nucleic acid sequence encoding for improved yield under drought stress is crossed with a cereal grass plant having a relatively lower yield under drought stress that preferably exhibits commercially desirable characteristics, such as, but not limited to, disease resistance, insect resistance, weed resistance, etc. The resulting plant population (representing the F1 hybrids) is then self-pollinated and set seeds (F2 seeds). The F2 plants grown from the F2 seeds are then screened for improved yield under drought stress. The population can be screened for improve yield under drought stress in a number of different ways. For example, the population can be screened by field evaluation over several seasons. Yield may be determined by weight of grain per hectare (e.g., t ha⁻¹, kg ha⁻¹), average grain weight per plant, or any other method known in the art.

[0150] A Cereal Grass Plant Having Improved Yield under Drought Stress, or a Part Thereof, Obtainable by a Method of the Invention is Also an Aspect of the Present Invention.

[0151] Another aspect of the present invention relates to a cereal grass plant having improved yield under drought stress, or part thereof, comprising within its genome at least one QTL, or a yield-improving part thereof, consisting at least in part of the QTL on chromosome 12 of WayRarem associated with improved yield under drought stress, wherein the QTL or the yield improving part thereof is not in its natural genetic background. The cereal grass plants having improved yield under drought stress of the present invention can be of any genetic type such as inbred, hybrid, haploid, dihaploid, parthenocarp, or transgenic. Further, the plants of the present invention may be heterozygous or homozygous for the improved yield under drought stress trait, preferably homozygous. Although the QTLs of the present invention, as well as those QTLs obtainable by a method of the invention, as well as yield-improving parts thereof, may be transferred to any plant in order to provide for a plant having improved yield under drought stress, the methods and plants of the invention are preferably related to the cereal grasses family, more preferably rice.

[0152] Inbred cereal grass lines having improved yield under drought stress can be developed using the techniques of recurrent selection and backcrossing, selfing and/or dihaploids or any other technique used to make parental lines. In a method of selection and backcrossing, improved yield under drought stress can be introgressed into a target recipient plant (which is called the recurrent parent) by crossing the recurrent parent with a first donor plant (which is different from the recurrent parent and referred to herein as the “non-recurrent parent”). The recurrent parent is a plant that has relatively low yield under drought stress and possesses commercially desirable characteristics, such as, but not limited to disease resistance, insect resistance, weed resistance, etc. The non-recurrent parent comprises a nucleic acid sequence that encodes for improved yield under drought stress. The non-recurrent parent can be any plant variety or inbred line that is cross-fertile with the recurrent parent. The progeny resulting from a cross between the recurrent parent and non-recurrent parent are backcrossed to the recurrent parent. The resulting plant population is then screened. The population can be screened in a number of different ways. F1 hybrid plants that exhibit improved yield under drought stress, comprise the requisite nucleic acid sequence encoding for improved yield under drought stress, and possess commercially desirable characteristics, are then selected and selfed and selected for a number of generations in order to allow for the cereal grass plant to become increasingly inbred. This process of continued selfing and selection can be performed for two to five or more generations. The result of such breeding and selection is the production of lines that are genetically homogenous for the genes associated with improved yield under drought stress as well as other genes associated with traits of commercial interest. Instead of using phenotypic pathology screens of bioassays, MAS can be performed using one or more of the herein described molecular markers, hybridization probes or nucleic acids to identify those progeny that comprise a nucleic acid sequence encoding for improved yield under drought stress. Alternatively, MAS can be used to confirm the results obtained from the quantitative bioassays. Once the appropriate selections are made, the process is repeated. The process of backcrossing to the recurrent parent and selecting for improved yield under drought stress is repeated for approximately five or more generations. The progeny resulting from this process are heterozygous for one or more genes that encode for improve yield under drought stress. The last backcross generation is then selfed in order to provide for homozygous pure breeding progeny for improved yield under drought stress.

[0153] The cereal grass lines having improved yield under drought stress described herein can be used in additional crossings to create hybrid plants having improved yield under drought stress. For example, a first inbred cereal grass plant having improved yield under drought stress of the invention can be crossed with a second inbred cereal grass plant possessing commercially desirable traits such as, but not limited to, disease resistance, insect resistance, weed resistance, etc. This second inbred cereal grass line may or may not have relatively improved yield under drought stress.

[0154] Marker Assisted Selection and Backcrossing.

[0155] qDTY_{12.1} MAS and MABC are described herein.

[0156] As is known to those skilled in the art, there are many kinds of molecular markers. For example, molecular markers can include restriction fragment length polymorphisms (RFLP), random amplified polymorphic DNA (RAPD), amplified fragment length polymorphisms (AFLP), single nucleotide polymorphisms (SNP) or simple sequence repeats (SSR). Simple sequence repeats (SSR) or microsatellites are regions of DNA where one to a few bases are tandemly repeated for few to hundreds of times. For example, a di-nucleotide repeat would resemble CACACACA and a trinucleotide repeat would resemble ATGATGATGATG (SEQ ID NO: 141). Simple sequence repeats are thought to be generated due to slippage mediated errors during DNA replication, repair and recombination. Over time, these repeated sequences vary in length between one cultivar and another. An example of allelic variation in SSRs would be: allele A being GAGAGAGA (4 repeats of the GA sequence) and allele B being GAGAGAGAGAGA (6 repeats of the GA sequence) (SEQ ID NO: 142). When SSRs occur in a coding region, their survival depends on their impact on structure and function of the encoded protein. Since repeat tracks are prone to DNA-slippage mediated expansions/deletions, their occurrences in coding regions are limited by non-perturbation of the reading frame and tolerance of expanding amino acid stretches in the encoded proteins. Among all possible SSRs, tri-nucleotide repeats or multiples thereof are more common in coding regions.

[0157] A single nucleotide polymorphism (SNP) is a DNA sequence variation occurring when a single nucleotide—A, T, C or G—differs between members of a species (or between paired chromosomes in an individual). For example, two sequenced DNA fragments from two individuals, AAGCCTA to AAGCTTA, contain a difference in a single nucleotide. In this case, there are two alleles: C and T.

[0158] A primary motivation for development of molecular markers in crop species is the potential for increased efficiency in plant breeding through marker assisted selection (MAS) and marker assisted backcrossing (MABC). Genetic marker alleles, or alternatively, identified QTL alleles, are used to identify plants that contain a desired genotype at one or more loci and that are expected to transfer the desired genotype, along with a desired phenotype to their progeny. Genetic marker alleles can be used to identify plants that contain a desired genotype at one locus or at several unlinked or linked loci (e.g., a haplotype) and that would be expected to transfer the desired genotype, along with a desired phenotype to their progeny. The present invention provides the means to identify cereal grass plants, particularly rice, that are able to improve the yield of grain under drought stress by identifying plants having a specified quantitative trait locus or gene, e.g., qDTY_{12.1}, OsNAM_{12.1}, and homologous or linked markers. Similarly, by identifying plants having poor yield under drought stress, such low-yielding plants can be identified and, e.g., eliminated from subsequent crosses.

[0159] After a desired phenotype, e.g., improved yield under drought stress and a polymorphic chromosomal locus, e.g., a marker locus or QTL, are determined to segregate together, it is possible to use those polymorphic loci to select for alleles corresponding to the desired phenotype: a process called marker-assisted selection (MAS). In brief, a nucleic acid corresponding to the marker nucleic acid is detected in a biological sample from a plant to be selected. This detection can take the form of hybridization of a probe nucleic acid to a marker, e.g., using allele-specific hybridization, Southern analysis, northern analysis, in situ hybridization, hybridization of primers followed by PCR amplification of a region of the marker or the like. A variety of procedures for detecting markers are described herein. After the presence (or absence) of a particular marker and/or marker allele in the biological sample is verified, the plant may be selected, i.e., used to make progeny plants by selective breeding.

[0160] Rice breeders combine modern irrigated rice varieties, e.g. Vandana and Sabitri, with genes for improved yield under drought stress and other desirable traits to develop improved rice varieties. Screening a large number of plants for improved yield under drought stress can be expensive, time consuming and unreliable. Use of the polymorphic loci described herein, and genetically-linked nucleic acids, as genetic markers for the improved yield under drought stress locus is an effective method for selecting varieties capable of fertility restoration in breeding programs. For example, one advantage of marker-assisted selection over field evaluations for improved yield under drought stress is that MAS can be done at any time of year regardless of the growing season. Moreover, environmental effects are irrelevant to marker-assisted selection.

[0161] Another use of MAS in plant breeding is to assist the recovery of the recurrent parent genotype by backcross breeding. Backcross breeding is the process of crossing a progeny back to one of its parents. Backcrossing is usually done for the purpose of introgressing one or a few loci from a donor parent into an otherwise desirable genetic background from the recurrent parent. The more cycles of backcrossing that are done, the greater the genetic contribution of the recurrent parent to the resulting variety. This is often necessary, because donor parent plants may be otherwise undesirable. In contrast, varieties which are the result of intensive breeding programs may have excellent yield, fecundity or the like, merely being deficient in one desired trait such as yield under drought stress. As a skilled worker understands, backcrossing can be done to select for or against a trait.

[0162] Markers corresponding to genetic polymorphisms between members of a population can be detected by numerous methods, well-established in the art (e.g., restriction fragment length polymorphisms, isozyme markers, allele specific hybridization (ASH), amplified variable sequences of the plant genome, self-sustained sequence replication, simple sequence repeat (SSR), single nucleotide polymorphism (SNP) or amplified fragment length polymorphisms (AFLP)).

[0163] The majority of genetic markers rely on one or more properties of nucleic acids for their detection. For example, some techniques for detecting genetic markers utilize hybridization of a probe nucleic acid to nucleic acids corresponding to the genetic marker. Hybridization formats include but are not limited to, solution phase, solid phase, mixed phase or in situ hybridization assays. Markers which are restriction fragment length polymorphisms (RFLP), are detected by hybridizing a probe (which is typically a sub-fragment or a synthetic oligonucleotide corresponding to a sub-fragment of the nucleic acid to be detected) to restriction digested genomic DNA. The restriction enzyme is selected to provide restriction fragments of at least two alternative (or polymorphic) lengths in different individuals and will often vary from line to line. Determining a (one or more) restriction enzyme that produces informative fragments for each cross is a simple procedure, well known in the art. After separation by length in an appropriate matrix (e.g., agarose) and transfer to a membrane (e.g., nitrocellulose, nylon), the labeled probe is hybridized under conditions which result in equilibrium binding of the probe to the target followed by removal of excess probe by washing. Nucleic acid probes to the marker loci can be cloned and/or synthesized. Detectable labels suitable for use with nucleic acid probes include any composition detectable by spectroscopic, radioisotopic, photochemical, biochemical, immunochemical, electrical, optical or chemical means. Useful labels include biotin for staining with labeled streptavidin conjugate, magnetic beads, fluorescent dyes, radiolabels, enzymes and colorimetric labels. Other labels include ligands which bind to antibodies labeled with fluorophores, chemiluminescent agents and enzymes. Labeling markers is readily achieved such as by the use of labeled PCR primers to marker loci.

[0164] The hybridized probe is then detected using, most typically, autoradiography or other similar detection technique (e.g., fluorography, liquid scintillation counter, etc.). Examples of specific hybridization protocols are widely available in the art.

[0165] Amplified variable sequences refer to amplified sequences of the plant genome which exhibit high nucleic acid residue variability between members of the same species. All organisms have variable genomic sequences and each organism (with the exception of a clone) has a different set of variable sequences. Once identified, the presence of specific variable sequence can be used to predict phenotypic traits. Preferably, DNA from the plant serves as a template for amplification with primers that flank a variable sequence of DNA. The variable sequence is amplified and then sequenced.

[0166] In vitro amplification techniques are well known in the art. Examples of techniques sufficient to direct persons of skill through such in vitro methods, including the polymerase chain reaction (PCR), the ligase chain reaction (LCR), O,β-replicase amplification and other RNA polymerase mediated techniques (e.g., NASBA), are readily found in the art. One of skill will appreciate that essentially any RNA can be converted into a double stranded DNA suitable for restriction digestion, PCR expansion and sequencing using reverse transcriptase and a polymerase.

[0167] Oligonucleotides for use as primers, e.g., in amplification reactions and for use as nucleic acid sequence probes, are typically synthesized chemically according to the solid phase phosphoramidite triester method, or can simply be ordered commercially.

[0168] Alternatively, self-sustained sequence replication can be used to identify genetic markers. Self-sustained sequence replication refers to a method of nucleic acid amplification using target nucleic acid sequences which are replicated exponentially in vitro under substantially isothermal conditions by using three enzymatic activities involved in retroviral replication: (1) reverse transcriptase, (2) Rnase H and (3) a DNA-dependent RNA polymerase. By mimicking the retroviral strategy of RNA replication by means of cDNA intermediates, this reaction accumulates cDNA and RNA copies of the original target.

[0169] As mentioned above, there are many different types of molecular markers, including amplified fragment length polymorphisms (AFLP), allele-specific hybridization (ASH), single nucleotide polymorphisms (SNP), simple sequence repeats (SSR), and isozyme markers. Methods of using the different types of molecular markers are known to those skilled in the art.

[0170] The qDTY_{12.1} QTL and genes NAM_{12.1}; GPDP_{12.1}; STPK_{12.1}; POLe_{12.1}; MtN3_{12.1}; WAK_{12.1}; CesA_{12.1}; GDP_{12.1}; ARF_{12.1}; Nod_{12.1}; and AmH1_{12.1}, or homologs thereof, in the genome of a plant exhibiting a preferred phenotypic trait is determined by any method listed above, e.g., RFLP, AFLP, SSR, etc. If the nucleic acids from the plant are positive for one or more desired genetic markers, the plant can be selfed to create a true breeding line with the same genotype or it can be crossed with a plant with the same marker or with other desired characteristics to create a sexually crossed hybrid generation.

[0171] It will be recognized by one skilled in the art that the materials and methods of the present invention may be similarly used to confer improved yield under drought stress in cereal grasses other than rice, such as corn, wheat, barley, sorghum, millet, oats, and rye

### EXAMPLES

### Example 1

### A Gene-Complex Affecting Multiple Component Traits Underpins a Large-Effect QTL for Rice Yield Under Drought

[0172] Materials and Methods.

[0173] Plant Material.

[0174] qDTY_{12.1} was identified in an F_{3:4} population derived from the cross Vandana/WayRarem. Vandana is an upland-adapted cultivar derived from a cross between C22 and Kalakeri. This cultivar is early to mature, and low yielding but tolerant of drought, and is grown in drought-prone areas of Jharkhand and Orissa (eastern India). WayRarem is a high-yielding, drought-susceptible upland rice cultivar from Indonesia. The yield-increasing allele in this study was derived from the susceptible parent, WayRarem, making the tolerant parent Vandana the recipient parent for a MAB program. IR79971-B-102-B, one of the F₃-derived lines from the original population, was used as the donor for qDTY_{12.1}. This line was backcrossed to Vandana to develop BC₂- and BC₃-derived populations for the identification of NILs with qDTY_{12.1} showing improved tolerance of drought compared with Vandana. A set of such contrasting+QTL and −QTL BC₂F₃-derived lines was used for the qDTY_{12.1} physiology studies.

[0175] Generation of Genotypic Data.

[0176] Young leaves were collected from 2-week-old plants and freeze-dried. Freeze-dried leaf samples were ground using a Geno/Grinder® (SPEX CertiPrep) and DNA was extracted by the modified CTAB method in deep-well plates. The quality and quantity of DNA were then checked on 0.8% agarose gel and diluted to a final concentration of 20 ng μL⁻¹ with TE (Tris-EDTA) buffer. Polymerase chain reaction (PCR) was performed in 96-well plates. After the PCR was completed, 4 μL of 6× loading dye was added to each well. Four μL of the resulting solution mix was then loaded into an 8% (w/v) polyacrylamide gel for size separation of the amplified DNA fragments using a mini vertical electrophoresis system (CBS Scientific, model MGV-202-33). DNA fragments were then stained with SYBR® Safe gel stain (Invitrogen) and visualized with a UV trans-illuminator.

[0177] Rice SSR markers (RM28076, RM28089, RM28099, RM28130, RM511, RM1261, RM28166, RM28199, RM28048, and Indel-8) were used for foreground, recombinant, and background selection. All markers described by Bernier et al. (2007) were used for selection. Three other markers, RM28076, RM28089, and RM28099, were also included for foreground and recombinant selection. The cM position was used for constructing chromosome maps. Graphical genotyping software GGT2 was used for the construction of chromosome maps of the selected lines.

[0178] Molecular Marker Analysis and Crossing Scheme.

[0179] The MAB scheme for the transfer of qDTY_{12.1} into Vandana is shown in FIG. 4B. qDTY_{12.1} spans between RM28048 and RM28166 on chromosome 12 of the rice genome. IR79971-B-102-B, an F_{3:4} line with the full segment of the QTL, was crossed twice to Vandana to develop a BC₂F₁ (241 plants). The population was screened with RM28048, RM511, and RM28166 to identify individual plants segregating for qDTY_{12.1} (foreground selection). The selected plants were then screened with 42 SSR markers for the presence of the Vandana allele across the background (background selection) and two BC₂F₁ plants (IR84984-21-19 and IR84984-83-15) segregating for qDTY_{12.1} and maximum background recovery were identified to develop the BC₂F₂ population. A large BC₂F₂ population (1907 plants) was developed from the identified BC₂F₁ plants and was genotyped with foreground markers RM28048, RM28130, and CG29430 to identify lines segregating for the qDTY_{12.1} locus. The 180 BC₂F₃ lines identified through this process were then saturated with six additional SSR markers, RM28076, RM28089, RM28099, RM511, RM1261, and RM26166, within the region and were screened under varying drought-stress conditions to identify high-yielding BC₂F₃-derived NILs. Lines from this population with and without the full region of the QTL (RM28048-RM28166) were also used for the study of QTL physiology. Six BC₂F_{3:4} lines, IR84984-21-19-861-B, IR84984-21-19-158-B, IR84984-21-19-177-B, IR84984-21-19-917-B, IR84984-83-15-805-B, and IR84984-83-15-937-B, were backcrossed to Vandana to generate 148 BC₃F₁ plants. These lines were also screened with all background markers segregating in the BC₂F₁ background screening. The BC₃F₁ plants were screened with all eight markers within the QTL, and 15 BC₃F₁ plants segregating for different segments of qDTY_{12.1} were selected for developing a large BC₃F₂ population (2263 plants). Since this population came from 15 different F₁ plants, the inventors were able to divide it into 15 sub-populations, each segregating for a different segment of the QTL. These sub-populations were then genotyped with all segregating markers within the QTL based on the respective F₁ information available and 470 BC₃F₂ plants were identified. The genotypes of these plants were confirmed with all eight markers within the QTL region and BC₃F₃ lines from these plants were screened under drought stress and non-stress conditions. The 52 best BC₃F_{3:4} lines were selected based on their field performance under stress. These lines were then evaluated under non-stress conditions for superior plant type and yield and single panicle selections were conducted. Seeds from 62 different lines coming from BC₂- and BC₃-derived populations were multiplied under non-stress conditions and confirmed for the presence of qDTY_{12.1} along with background screening with segregating markers. Thirty-five selected lines with the qDTY_{12.1} segment were evaluated in advanced yield trials (AYTs) under upland stress and non-stress conditions and four BC₂-derived and three BC₃-derived lines with qDTY_{12.1}, superior plant type, the highest Vandana genome recovery, and highest yield under non-stress conditions were identified.

[0180] Reproductive-Stage Drought Screening Experiments.

[0181] Field experiments were conducted from at the International Rice Research Institute (IRRI), Los Baños, Laguna, Philippines, located at 14° 13′N latitude, 121° 15′E longitude, at an elevation of 21 m.

[0182] Population screening and physiological characterization were conducted in upland conditions under drought and non-stress treatments in either the open field or rainout shelter. Throughout this study, the term ‘upland’ refers to field trials conducted under direct-seeded, non-puddled, non-flooded aerobic conditions in leveled upland fields. Screening of BC₂F_{3:4} and BC₃F_{3:4} lines with qDTY_{12.1} developed through MAB, and subsequent AYTs and physiology studies, were conducted using an α-lattice or randomized complete block design along with Vandana, WayRarem, in 2-4 replications of 1-4 row plots 1.5-3 m in length, 0.25 m row-to-row spacing and 2.0-2.5 g seed per linear meter. Fertilizer and crop management practices were followed as described by Bernier et al. (2007). In all stress experiments, trials were sprinkler-irrigated twice a week during establishment and early vegetative growth. A line source sprinkler was used to create a gradient with 3 distinct treatments. At 35 days after seeding, stress was initiated by withholding irrigation and plots were irrigated only when the soil water tension fell below −50 kPa at 30-cm soil depth and most lines had wilted and exhibited leaf drying. Upland non-stress trials received the same cultural practices as the stress trials except that irrigation was continued twice a week up to 10 days before harvest.

[0183] Morphophysiology Measurements.

[0184] Genetic variation for water uptake was determined by volumetric soil moisture at 10 cm depth increments (Diviner 2000, Sentek Sensor Technologies, Stepney SA, Australia) in 2012DS and 2012WS, where PVC tubes were installed in all plots at the mid-point between rows and hills, ˜30 cm from the edge of the plot. Root samples were taken between 58 and 85 DAS with 3 subreplicates per plot using a 4-cm-diameter core sampler to a depth of 60 cm, washed, scanned, and analyzed according to Henry et al. 2011. TE was assessed in 2012DS and WS by carbon isotope analysis of the 2 youngest leaves sampled from 3 plants per plot at 2-week intervals from 21-70 DAS. Δ¹³C was calculated as (−8−leaf ¹³C conc)/(1+(leaf ¹³C conc/1000)) according to Farquhar et al. 1989.

[0185] Instantaneous transpiration efficiency (TE) was determined at 44 DAS in 2012 WS by LI-6400 portable gas exchange system (Li-Cor Inc., Lincoln, Nebr., USA). In all field trials, days to 50% flowering (DTF), mean plant height at maturity (PH), grain yield, and biomass were recorded according to Venuprasad et al. (2009) from a 2-m² (stress) and 0.125-2.0 m² (non-stress) area of each plot. Statistical analysis approach is outlined in Table 1.

TABLE 1
Statistical analysis used.

| Pᵢⱼₖ = M + Rᵢ + Bⱼ (Rᵢ) + Lₖ + eᵢⱼₖ | |
|---|---|
| Add. (%) = [(T_{L} − T_{V}/2)/Tv]*100 | |
| Symbol | Description |
| P | measurement recorded on a plot |
| M | mean over all plots |
| R | replications |
| B | blocks |
| L | lines |
| e | error |
| Additive (%) | percentage additive effect of the line |
| T_{L} | trait value for the line with the QTL |
| T_{V} | trait value of the recipient parent |
| Statistical Package | Purpose |
| CROPSTAT v 7.2 | Yield trials |
| (63) | |
| R v. 2.8.0 (64) | Physiology expts. |

[0186] Seedling Stage Trials.

[0187] Seedling stage stress trials were established in upland fields in both dry and wet seasons as described above, except that the drought stress treatment was initiated 7 DAS and plants were harvested at 32 DAS to determine biomass. A seedling greenhouse study was conducted in 4-cm-diam 40-cm deep soil-filled tubes according to Henry et al. 2012. Soil moisture treatments included well-watered (WW; maintained at field capacity) and dry down from field capacity (DD), with five replicates per genotype planted in an RCBD. Water uptake, shoot mass, and root length were determined, including one nodal root from each plant with all lateral roots carefully spread apart in order to detect the number of root branches.

[0188] Root Phenotyping.

[0189] Mature dehusked seeds of Vandana, WayRarem, NIL, 6 recombinant lines, IR64 (Parent for the transgenic line) and 3 transgenic events were sterilized in 1% Sodium Hypochlorite and were germinated in MS₀ media (KNO₃ —1.9 g/L, (NH₄)₂SO₄ —1.65 g/L, MgSO₄.H2O—0.37 g/L, MnSO₄.4H₂O—22.3 mg/L, ZnSO₄.7H₂O—8.6 mg/L, CuSO₄.5H₂O—0.025 mg/L, CaCl₂.2H₂O—0.44 g/L, KI—0.83 mg/L, CoCl₂.6H₂O—0.025 mg/L, KH₂PO₄—0.17 g/L, H₃BO₃—6.2 mg/L, Na₂MoO₄.2H₂O—0.25 mg/L, FeSO₄.7H₂O—27.8 mg/L, Na₂EDTA.2H₂O—37.3 mg/L, Nicotinic acid—0.5 mg/L, Pyridoxine HCl—0.5 mg/L, Thiamine HCl—0.1 mg/L,Glycine—2 mg/L, myoinositol—100 mg/L, sucrose—30 g, gelrite—0.2% (w/v), pH to 5.8, sterilized at 121° C./15 psi for 15 minutes) in dark at 25-29° C. for 3 days. Ten pregerminated seeds per line were transferred into MS₀ with and without 10% (w/v) PEG (MW: 8,000) in test tubes and were grown under light at 29° C. The root morphology was observed after 8 days and was documented using Nikon D90 camera under diffused light.

[0190] Statistical Analysis and Construction of Linkage Maps.

[0191] The model used for analysis of variance for an α-lattice design was Pᵢⱼₖ=M+Rᵢ+Bⱼ(Rᵢ)+Lₖ+eᵢⱼₖ where Pᵢⱼₖ is the measurement recorded on a plot, M is the mean over all plots, and R, B, L, and e refer to replications, blocks, lines, and error, respectively. Data of yield trials for computation of means were analyzed using CROPSTAT v. 7.2 (IRRI, 2007) taking the effect of replications and block within replications as random. Additive effect of the line with the QTL was computed as Add. (%)=[(T_{L}−T_{V}/2)/T_{V}]*100 where Add. (%) is the percentage additive effect of the line with the QTL over the recipient parent (Vandana), T_{L}, is the trait value for the line with the QTL, and T_{V} is the trait value of the recipient parent (Vandana).

[0192] Statistical analyses for the physiology experiments were performed in R v. 2.8.0 (R Development Core Team, 2008) using ANOVA and Tukey's HSD test.

[0193] SNPs in the 10 Candidate Genes.

[0194] Targeted sequencing of the QTL region from Vandana, WayRarem and IR64 genomes were performed. Sequencing libraries for the three samples were created using Agilent SureSelect protocol for paired-end Illumina platform (Agilent Technologies: SureSelectXT Target Enrichment System for Illumina Paired-End Sequencing Library, V1.4.1; publication number G7530-90000). 3 μg of high quality genomic DNA was used per sample as starting material and sheared. Concentration of the sheared DNA were analyzed and checked for quality control. The libraries were then PCR amplified and hybridized with SureSelect custom made baits. Post-capture-PCR was performed on the hybridized samples to incorporate the sequencing Index Tag followed by another round of quality control for PCR efficiency in Bioanalyser. Each tag added library was quantified using qPCR with Agilent Technologies QPCR NGS library quantification kit (Illumina GA) on an Agilent Technologies MX3005 qPCR machine.

[0195] Once done, sequencing was performed by Ambry Genetics (15 Argonaut, Aliso Viejo, Calif. 92656, United States) using Illumina HiSeq2000. Initial data processing and base calling, including extraction of cluster intensities, was done using RTA 1.12.4 (HiSeq Control Software 1.4.5). Sequence quality filtering script was executed in the Illumina CASAVA software (ver 1.8.2, Illumina, Hayward, Calif.).

[0196] The raw Fastq reads were mapped/aligned to the IRGSP Build 5 reference sequence using the Bowtie2 aligner. After the alignment, typically a round of quality control removal on reads with poor quality score was performed using Genespring 12.5 software (Agilent Technologies). Reads with average score less than 30 and with ambiguous (N) bases were removed. After filtering of reads on quality score, another filter was performed to address the duplicate artifact introduced due to the Polymerase Chain Reaction (PCR) bias for certain regions. In this setup, all duplicate status reads were removed leaving behind only 1 copy. Lastly, due to the enrichment done before the sequencing, reads outside the SureSelect region were removed. Finally, Single Nucleotide Polymorphisms (SNPs) were identified in Genespring 12.5.

[0197] Candidate Gene Selection.

[0198] qDTY12.1 covers a region of 1.75 Mb spanning the area between the markers RM28099 and RM28166. A total of 248 genes were collected from Gramene database. Since this region was closer to the centromere, there were a lot of transposons and retro-transposons. As a first step, all the transposons and retro-transposons were removed.

[0199] There were 118 genes in 1.75 Mb spanning the QTL after dropping the (retro)transposons These were analyzed in silico for expression under drought from three experiments, (GSE26280, GSE24048 and GSE6901). Manual differential expression analysis in an Excel sheet using the relative values; SAM module in Excel); SAM module in TIGR MeV4 and Genevestigator were used. There were 28 recurrent genes in these analyses. This information was combined with sequence polymorphism to narrow down the potential CGs. After literature survey, 10 CGs were picked which were analyzed for promoter cis-elements and gene ontology (GO) analysis which supported the selection of the 10 genes as putative CGs. In another analysis, putative NAM binding sites were predicted. The NAM binding motif was generated from literature and sites predicted using an in house perl script. This allowed the selection of OsAmH_{12.1}.

[0200] In order to understand the cis-elements governing the expression of these 10 CGs, promoters of these genes were submitted to PLACE database (dna.affrc.go.jp/PLACE). Drought specific cis-elements were observed in all the 10 CGs. To gain a clearer insight into the functional characteristic of the genes and their role, gene ontologies were predicted in ARGOT² (medcomp.medicina.unipd.it/Argot2/index.php).

[0201] In another separate analysis, putative NAM binding sites were predicted in the genes of the QTL. The NAM binding motif was generated from various literature sources and those sites were predicted using an in house built perl script.

[0202] Fine Mapping.

[0203] Nearly 1900 BC2F3 lines were phenotyped for drought tolerance through yield analysis and these lines were then genotyped using SSR markers described herein. Fifty six of these lines were genotyped with 9 candidate gene-based markers using primers designed (Table 2) after comparing the Vandana and WayRarem sequence obtained from the NGS data.

TABLE 2
Primers used for Fine mapping

| GENE | PRIMER NAME | SEQUENCE | SEQ ID NO: |
|---|---|---|---|
| OsAmh_{12.1} | AMI_C2_F2 | TTTGCCAGCTTTGACCTTCA | 143 |
| OsAmh_{12.1} | AMI_C2_R2 | CCATCGACCGTTGCACATTA | 144 |
| OsARF_{12.1} | ARF_C3_F2 | ACCTCCCGTTGCTTCTCTC | 145 |
| OsARF_{12.1} | ARF_C3_R2 | TCGGAGAGAATTTCGGGCTC | 146 |
| OsNAM_{12.1} | NAM12_PF + 1656 | CCACATCGGTTATGACCA | 147 |
| OsNAM_{12.1} | 5UNAM12-R1 | CGTCTCCATCGATACACCTC | 148 |
| OsGDP_{12.1} | GRAM_C2_F2 | CACCATCTGTCCAAAGTCCA | 149 |
| OsGDP_{12.1} | GRAM_C2_R | GTAACTCTGCTCCGGCAACT | 150 |
| OsGPDP_{12.1} | W-GPDP-C3-F1 | TCGTTTATTCTATTGTTTGCCA | 151 |
| OsGPDP_{12.1} | W-GPDP-C3-R1 | CCATCTCCTTGGCGTGTACAA | 152 |
| OsCesA_{12.1} | Cesa_CF1 | GTGCTGTCCATATATCCTCGC | 153 |
| OsCesA_{12.1} | Cesa_CR1 | CAACCTGGACCATAGCCGCT | 154 |
| OsMtN3_{12.1} | NOD CF2 | CTACCGGATCTACAAGAGCAAG | 155 |
| OsMtN3_{12.1} | NOD CR2 | GATCTTCGTCGTGAACACC | 156 |
| OsPOle_{12.1} | POLe_C2_F | GCGCCAAAATTTCTTGGT | 157 |
| OsPOle_{12.1} | POLe_C2_R2 | CTTCTCGGCGGTGATCTTGA | 158 |
| OsWAK_{12.1} | WAK_Pro_F | CTCTCTACTCGCCAACCACC | 159 |
| OsWAK_{12.1} | WAK_Pro_R | CATGAACAGCCTGGTGTCGT | 160 |

[0204] Preparation of c-DNA for Expression Study.

[0205] The seeds of recipient parent Vandana, NIL and the donor parent WayRarem were sown in staggered manner so that they reach the stage of booting at the same time in four replicates. Excess water was removed from the pots in two of the replicates and further watering was stopped after 52 days for sowing of Vandana while maintaining the other two replicates in well-watered condition. Explants were collected for RNA isolation after the complete rolling of leaves which occurred after 3 days of dewatering. Similarly roots and leaves of two homozygous transgenic lines and a non-transformed control IR64 plants were collected from the physiology experiment conducted to screen the drought tolerance of the OsNAM transgenic lines. Total RNA was isolated from the leaf, root and panicle of the stressed and the well watered control plants by using Trizol reagent (Ambion, Austin, Tex., USA). The cDNA was synthesized using the ImProm-II Reverse transcription system (Promega Corporation, Madison, USA) as per the manufacturer's instruction.

[0206] RT-PCR Protocol.

[0207] Primer pairs for use in RT-PCR experiments were designed based on the coding sequence of candidate genes (sequences obtained from Gramene) (Table 3).

TABLE 3
Primers used in studies with qDTY121

| | | | | SEQ | |
|---|---|---|---|---|---|
| | | | | ID | |
| Gene Name | Locus ID | Primer | Sequence information | NO: | Purpose |
| Nodulin MtN3 | LOC_Os12g29220 | NOD_CF2 | 5′-ctaccggatctacaagagcaag-3′ | 155 | RT-PCR |
| family protein | | NOD_CR2 | 5′-gatcttcgtcgtgaacacc-3′ | 156 | RT-PCR |
| Amidohydrolase | LOC_Os12g28270 | AMDH_CF3 | 5′-ggcgtgaggcgtacatcac-3′ | 161 | RT-PCR |
| | | AMDH_CR1 | 5′-ggagtactgattggtagtgtcg-3′ | 162 | RT-PCR |
| No apical | LOC_Os12g29330 | NAM_CF2 | 5′-gagtgagcaggagaggta-3′ | 163 | RT-PCR |
| meristem protein | | NAM_CR2 | 5′-catgacccagtccgtcttct-3′ | 164 | RT-PCR |
| Serine/threonine | LOC_Os12g27520 | SER_CF2 | 5′-tagtgcaaagccttccctgt-3′ | 165 | RT-PCR |
| protein kinase | | SER_CR2 | 5′-cctgcggtagctttcgtaac-3′ | 166 | RT-PCR |
| Cellulose | LOC_Os12g29300 | CESA_F | 5′-gcgtcttcttcgactgcac-3′ | 167 | RT-PCR |
| synthase | | CESA_R | 5′-caacctggaccatagccgct-3′ | 154 | RT-PCR |
| Expressed | LOC_Os12g29340 | EXP_CF1 | 5′-gctgaaagcctctccatgtt-3′ | 168 | RT-PCR |
| protein | | EXP_CR1 | 5′-gcatgatgcatagtggatgg-3′ | 169 | RT-PCR |
| GRAM domain | LOC_Os12g29400 | GDP_CF2 | 5′-tactcacccagccatggac-3′ | 170 | RT-PCR |
| containing | | GDP_CR2 | 5′-cggcgaacgtctgcttgta-3′ | 171 | RT-PCR |
| protein | | | | | |
| Auxin response | LOC_Os12g29520 | ARF_CF2 | 5′-tggcacatggtctcttatgc-3′ | 172 | RT-PCR |
| factor | | ARF_CR2 | 5′-agaggagcgctgatctatgc-3′ | 173 | RT-PCR |
| Wall associated | LOC_Os12g29430 | WPK_CF2 | 5′-gcctcactactggaagaagg-3′ | 174 | RT-PCR |
| protein kinases | | WPK_CR2 | 5′-tcccctctagctgatatgc-3′ | 175 | RT-PCR |
| Pollen Ole | LOC_Os12g28770 | OLE_CF2 | 5′-cgtcatcgacaacccctcgc-3′ | 176 | RT-PCR |
| | | OLE_CR2 | 5′-cagtagaacagcgacgtgtt-3′ | 177 | RT-PCR |
| No apical | LOC_Os12g29330 | NAM101- | 5′-ttgatittgccgaggtgta-3′ | 178 | Cloning |
| meristem protein | | 119F | | | |
| | | NAM168- | 5′cctgctcactccaccctggaggaag | 179 | Cloning |
| | | 186R1 | caggtcgga-3′ | | |
| GRAM domain | LOC_Os12g29400 | ProGDP01 | 5′-ggcctccaaaatttatagtccca-3′ | 133 | EMSA |
| protein | | ProGDP02 | 5′-gtggagaggcctcctgtttac-3′ | 134 | EMSA |
| (Promoter) | | | | | |
| Cellulose | LOC_Os12g29300 | ProCESA01 | 5′-gaggcttcctgttgactggt-3′ | 135 | EMSA |
| synthase | | ProCESA02 | 5′-attgcctccgttggtgttga-3′ | 136 | EMSA |
| (Promoter) | | | | | |
| Auxin response | LOC_Os12g29520 | ProARF01 | 5′-tctgtagccccgctattctt-3′ | 137 | EMSA |
| factor (Promoter) | | ProARF02 | 5′-aggtagagcggtgaggtcac-3′ | 138 | EMSA |
| Nodulin MtN3 | LOC_Os12g29220 | ProNOD01 | 5′-tacccgtgcaaacaaagaacag-3′ | 139 | EMSA |
| family protein | | ProNOD02 | 5′-ggaaagtcttttggacacgc-3′ | 140 | EMSA |
| (Promoter) | | | | | |

[0208] Real-Time PCR Protocol (qRT-PCR).

[0209] The reaction was set in 20 μl volume consisting of 5.0 μl of normalized cDNA, 10 μl of 2×SYBR green PCR master mix (Roche Diagnostics GmbH, Germany), and 1 μl each of 10× primer pair. Reactions were run in duplicate in a 7500 Fast Real-Time PCR System (Applied Biosystems, Foster City, USA). The amplification conditions maintained were 95° C. for 15 min, 40 cycles of denaturing at 94° C. for 15 s, annealing at 55° C. for 30 s, and extension at 72° C. for 30 s, followed by a disassociation stage (melting curve analysis). The comparative threshold cycle (ΔΔCt) method was used to quantify the relative expression levels.

[0210] Haplotype Analysis.

[0211] Genomic DNA was extracted from young leaf tissue of 125 purified (homozygous) rice varieties and wild ancestors using Qiagen DNeasy columns, made into paired-end libraries and sequenced on an Illumina Genome Analyser II, providing reads of 88, 100 and 120 bp lengths. Short reads were aligned to the Nipponbare reference genome and SNP genotypes were called using “Panati” (Mark Wright, Cornell University). Genome coverage was >7× genome equivalents in each case. Fastq data has been deposited in the Short Read Archive at NCBI as Acc_ID SRA# SAMN02142729-SAMN02142853. Subpopulation identity of the O. sativa varieties was analyzed using Principle Component Analysis (PCA). The haplotype structure of a ˜6 kB region surrounding the OsNAM12.1 gene was analyzed, including 2 kB upstream and downstream of the 5′ and 3′ untranslated regions (UTRs).

[0212] Immunoblot Assays.

[0213] Proteins were extracted from the roots of the rice plants from both the treatments (drought stress & well-watered) using the trichloroacetic acid-acetone method and dissolved in solubilisation buffer containing 9M urea, 4% CHAPS, 1% DTT, and 1% Biolyte Amphotytes (pH 3-10; BIO-RAD Laboratories, Inc, Hercules, Calif., USA). Protein concentration of the extracts was determined using the Bradford method. Protein samples (125 μg) were rehydrated overnight at room temperature on an IPGphor using IPG Dry-Strips (7 cm, pH 3-10; non-linear gradient, GE Healthcare, USA), followed by iso-electric focusing at 10.8 kVhrs. After two-step equilibration, the IPG strips were loaded on a 10% w/v SDS-PAGE gel using the 4-gel Mini-PROTEAN® Tetra cell (BIO-RAD Laboratories, Inc, Hercules, Calif., USA). The gels were run at 20V/gel for 2 h and kept until the dye front reached the bottom of the gel. The gels were visualized using the CBB-G250 and scanned using Quantity One software (BIO-RAD) at a resolution of 600 dpi. After electrophoresis, proteins were blotted onto a nitrocellulose membrane (Hybond-C Extra GE Healthcare Amersham Biosciences, USA) using the “semi-dry method” with a discontinuous buffer system. The blotting procedure was carried out for 1 h with a constant voltage of 17V. Subsequently, the membrane was blocked with 5% (w/v) dried skimmed milk in PBS-T (0.1% Tween 20 in phosphate buffered saline (PBS), 10 mM Na2HPO4, 1.75 mM KH2PO4, 13.7 mM NaCl and 2.86 mM KCl) at room temperature for 1 h. Incubation with primary antibody was performed in 5% (w/v) dried skimmed milk in PBS-T (0.01% Tween 20 in PBS) overnight at 4° C. The primary antibodies used for these experiments were anti-NAM antibody (1:1000 dilution of NAM polyclonal (0.39 mg)—Abexome Biosciences, India) and anti-SUMO (1:1000 dilution of Sumo 1 antibody (ab5316), Abcam PLC, Cambridge, England). Subsequently, incubation with HRP-conjugated secondary antibody (Goat Anti-Rabbit Antibody Conjugated to Horseradish Peroxidase—166-2408EDU-BIO-RAD Laboratories, Inc, Hercules, Calif., USA) was performed for detection. Incubation was done in 5% (w/v) dried skimmed milk in PBS-T (0.01% Tween 20 in PBS) at room temperature for 2 h. Chemiluminescence was detected by Novex® ECL Chemiluminescent Substrate Reagent Kit (Invitrogen, UK). Blots were exposed to autoradiographic films (Amersham Hyperfilm ECL) for chemiluminescent imaging.

[0214] Recombinant OsNAM_{12.1}.

[0215] Recombinant OsNAM_{12.1} was expressed in BL21 E. coli cells from a BamHI and XhoI construct in pGEX-4T1 (Promega) amplified from pCAMBIANAM using the primers NAMpGEXFor (CCCCGGATCCATGGAGACGACGGCG) (SEQ ID NO: 131) and NAMpGEXRev (GCGCCTCGAGTTAGTCGGAGGCGTCGCC) (SEQ ID NO: 132). Transformed cells were induced with 1 mM IPTG at 25° C. and induced cultures lysed in PBS buffer pH 7.4 by sonication. The soluble fraction was extracted by centrifugation at 1000×g for 30′. Protein was obtained after glutathione sepharose column chromatography (GE healthcare), by eluting with 10 mM glutathione, 50 mM Tris-Hcl pH 8.0. EMSA.

[0216] Electrophoretic Mobility Shift Assay

[0217] EMSA was performed using LightShift Chemiluminescent EMSA Kit (Thermo Scientific, USA). Around 400 bp to 450 bp promoters region of the target genes were Amplified by PCR using the following pairs primers: OsGDP12.1 (ProGDP01 and ProGDP02), OsCesA12.1 (ProCESA01 and ProCESA02), OsARF12.1 (ProARF01 and ProARF02) and OsNod12.1 (ProNOD01 and ProNOD02) (Table 1). Initially the DNA were labeled with biotin using Biotin 3′ End DNA Labeling Kit (Thermo Scientific, USA) followed by PCR purification using QIAquick PCR Purification Kit (QIAGEN). The labeled DNA was incubated with different concentration of OsNAM12.1GST for 20 min at 30° C. and were run on 4% native PAGE. The signals were detected according to the manufacturer's protocol.

[0218] SUMOylation Assay.

[0219] In vitro SUMOylation assay was carried out using SUMOylation kit (ENZO Life Sciences) by following the manufacturer's protocol.

[0220] TRIM Mutant Analysis.

[0221] TRIM lines used in the current study were M0074686, M0092628, M0111080, M0093267, M0032667 and M0066205 which were AT lines for OsCesA12.1, OsWAK12.1, OsGDP12.1, OsARF12.1, OsSTPK12.1 and OsPOLe12.1, respectively (Table 4). An additional AT line M0115183 was used for OsPOLe12.1. A KO line M0039637 was used for OsAmH12.1. Thirty T2 seeds were received for each line. They were imbibed for two days before subjected to the Yoshida medium with gerite in the presence (+) or absence (−) of 23% PEG. Genotyping was performed at Day 10 to identify homozygous, heterozygous, and wild type (no T-DNA integration) plants. qRT-PCR of the root tissue was then performed to confirm the AT/KO nature of each line. The photos of roots of each genotype were taken at Day 14. The roots were fixed at Day 20 and several root parameters were then assayed by scanner coupled with WinRhizo program.

[0222] Plant Transformation—Designing Overexpression Construct.

[0223] Binary vector IRS 537, derivative of pCambia 1300 vectors, was provided by Rice Biotech Lab, PBGB, IRRI. The expression of the IRS537 transgene is driven by the maize Ubiquitin promoter and terminated with Nos terminator. Since both of the binary vector and insert (OsNAM12.1 coding sequence) have BamHI and KpnI sites, about 2 ug of plasmid DNA from both vector and insert were digested using 1 ul each of BamHI and KpnI restriction enzyme (Invitrogen) with double digestion buffer, 0.5× Buffer K, for 2 hours at 37° C. Then the above two linearized fragments were purified and ligated using the T4 DNA ligase (Promega, USA) to produce the overexpression construct. The concentration of vector to insert was maintained in 1:3 ratio to avoid false positive by rejoining of vectors without any insert. Briefly, about 30 fM (20 ng) of plasmid vector and 90 fM (60 ng) of insert was ligated together using 1 U of T4 DNA ligase at 14° C. over night. The next day, the reaction was stopped by adding 0.5 μl of 50 mM EDTA before transformation. The ligated binary vector was transformed into E. coli DH5 alpha competent cells by heat shock method. Fusion result was confirmed by colony PCR and restriction digestion with BamHI and KpnI. Only the plasmid with double confirmed by PCR and restriction digestion was used for transformation into Agrobacterium tumefaciens strain LBA 4404.

[0224] Plant Transformation—Mobilization of the Construct into Agrobacterium tumefaciens.

[0225] Required number of vials containing 100 μl of Agrobacterium tumefaciens competent cells was thawed on ice for 10-15 min till the cells come into liquid phase. About 1 μg of supercoiled plasmid DNA was slowly added to the vial and swirled to mix the plasmid DNA. The cells were frozen in liquid N2 for 1-2 min for complete freezing and thawed by placing in water bath preheated to 37° C. for about 5 min (till the cell suspension is liquefied) and immediately 900 μl of YEB media will be added to each tube and mixed by inversion. The vials were incubated at 28° C. at 150 rpm for 3 hours. The cells were harvested by spinning for 30 seconds at 3000 rpm in a micro-centrifuge. Approximately 3/4 of the supernatant was decanted in the laminar air flow cabinet and the pellet was re-dissolved in the solution that was left behind by slow tapping. These cells were plated in 2 SOB media plates containing 10 mg/L of rifampicin, 50 mg/L kanamycin for which the resistance gene is conferred on the plasmid and incubated at 28° C. for 48 hours until the bacterial colonies became visible and big enough for streaking and colony PCR. Plasmid DNA was extracted from colony PCR positive clones and restricted by BamHI and KpnI to release the insert DNA. Only the colony confirmed by PCR and restriction digestion was used for transformation into immature embryo of IR64.

[0226] Plant Transformation—Transformation by Agrobacterium Mediated Transformation Method.

[0227] The overexpression construct was transformed into mega rice variety IR64 according to modified protocols of Hiei et al., (1997) with some modification. Roughly, about 250 of 10-12 days old immature embryos (IE) were isolated in sterilized condition. The IEs were transferred in a petri dish containing agar culture medium A201 with the scutellar side up (i.e. plumule-radicle axis side in contact with the medium). Fifty immature embryos were arranged per plate. Agrobacterium cells were harvested from 2 day old culture plate and added to liquid infection medium (A200) and the density of the culture was adjusted to OD595=0.3. The culture was incubated at 25° C. for 1 hour in dark. About 5 μl of the Agrobacterium culture was added to each embryo and the plate was incubated in dark at 25° C. in dark for one week. The shoot was carefully removed from the germinating embryo and it was blotted on sterile filter paper to remove the Agrobacterium. The embryo was placed back to resting medium A202 with 16 embryos arranged per plate for five days. The growing embryos were divided 4 equal parts and were incubated on selection medium (A203) containing 30 mg/L of hygromycin for 10 days. This was repeated three times. A hundred percent transformation efficiency was considered if three plants were produced from ¼ part of the IE. Resistant calli were transferred to A204 pre-regeneration medium (8 callus lines per Petri dish) containing 50 mg/L of hygromycin and were cultured for 10 days. The greenish embryogenic calli were transferred into A205regeneration medium (4 callus lines per Petri dish) with 50 mg/L of hygromycin for 10 days. After 10 days, growing shoots were selected and transferred to test tubes with solid MS medium for rooting 2 weeks. The well rooted plantlets were washed in tap water and were grown hydroponically in Yoshida culture solution. The composition and details of the media used for Agrobacterium mediated transformation are provided in Appendix 3 and 4.

[0228] Results.

[0229] The qDTY_{12.1} NILs Show Yield Advantage Under Drought in the Fields.

[0230] Using marker assisted backcrossing, NILs carrying the WayRarem qDTY_{12.1} were generated in the Vandana background with 93.4 to 95.9% recovery of the Vandana-genome (FIGS. 4A-4B, 5, 17). All NILs had a yield advantage of 300-500 kg/ha over Vandana under field drought (FIGS. 1A, 17). Mean grain yield was 323 kg/ha, with NIL IR84984-83-15-481-B (481-B) showing the largest increase in grain yield (693 kg/ha vs. 27 kg/ha for Vandana). Field evaluation over six trials in three seasons demonstrated that the additive effect of qDTY_{12.1} was proportional to drought severity. Average additive effect ranged from 4% under irrigation to 104% under severe drought (FIG. 1A). Greater mean yield was consistently observed in the NILs across 11 field trials over three years at a separate location and there was no significant change in length to width ratio of grains (FIG. 6). Also, the NILs exhibited seedling stage drought tolerance, measured over two seasons in the form of increase in shoot biomass (FIG. 6D).

[0231] Multiple Morpho-Physiological Component Traits are Improved in the NILs.

[0232] Under field drought conditions, all NILs exhibited increased biomass and harvest index, similar plant height and decreased number of days to flowering (DTF) compared to Vandana (FIG. 17). qDTY_{12.1} was shown to increase water uptake under drought. Under field drought conditions, NIL 481-B exhibited greater transpiration efficiency (TE) than Vandana through four different methods of analysis (FIGS. 2A-2D, 8) and demonstrated increased LRN (FIGS. 2E; 7B, 8D). Differences in LRN in Vandana and NILs were also observed at the seedling-stage in greenhouse studies (FIG. 7C) and even under polyethylene glycol (PEG) simulated water deficit in agar tubes (FIG. 2F). NILs also exhibited increased numbers of secondary branches and filled grains in the panicles (FIGS. 1B-1C). Taken together, NILs performed better under drought for multiple morpho-physiological component traits of yield including biomass, DTF, TE, LRN, number of panicle branches, total number of spikelets, and number of filled spikelets.

[0233] The Large-Effect qDTY_{12.1} is Composed of Sub-QTLs: The Search for Candidate Genes.

[0234] 1900 BC₂F₃ lines were genotyped to identify 52 that lacked the WayRarem allele for one or more of the SSR markers used across a 1.7-Mb region. R/QTL mapping revealed high LOD scores for the flanking markers and the two internal weak peaks indicated at least three fractions for qDTY_{12.1} (FIG. 18A). The LOD score trend reiterated the importance of the entire region. Hence, the Nipponbare-bait-based targeted NGS data (100×) was obtained for the 1.7-Mb region from Vandana and WayRarem. The Nipponbare qDTY_{12.1} region contained 45 genes other than those for retrotransposons, expressed and hypothetical proteins. Both Vandana and WayRarem lacked three ATPases and a Tetratricopeptide gene. Vandana lacked an additional gene (Cellulose synthase A; CesA10) that WayRarem retained. Considering the promoter and CDS, the sequence of 16 genes was >3% dissimilar between Vandana and WayRarem.

[0235] Genevestigator-mediated analysis for differential expression of the 45 genes under drought revealed 11 that were ≧2-fold up- or down-regulated. Four of these were also ≧3% dissimilar and thus potential candidate genes. Based on substantial sequence or expression polymorphism, combined with compelling relevance from literature on drought tolerance, six additional putative candidate genes were selected (FIG. 19). Quantitative transcript analysis of these 10 genes in Vandana and 481-B roots, leaves and panicles under normal and drought conditions revealed all 10 to be >2-fold up- or down-regulated in 481-B, in at least one of the three tissues (FIG. 19).

[0236] To identify strong candidate genes, a subset of 34 recombinant lines were genotyped for the Vandana/WayRarem allele of the nine putative candidate genes. This gene-based fine mapping fractionated qDTY_{12.1} into 4 regions (FIG. 18B). As the content of WayRarem alleles decreased, so did the yield (FIG. 18C). Also, as the stress level increased, more WayRarem alleles were required for better yield (FIG. 20). These results reiterated a role for multiple genes, spread along the 4 regions, for the full impact of qDTY_{12.1} Additionally, OsMtN3_{12.1} and OsNAM_{12.1} subtending the major peak were identified as candidate genes with higher probability of exerting stronger effects (FIG. 18B).

[0237] OsNAM_{12.1}.

[0238] The OsNAM_{12.1} protein contains a protein cleavage PEST motif (177-KGSAAASTASPTADADDDDATTER-200 (SEQ ID NO: 180); score 14.1) as in the negative regulatory domain of another drought responsive Arabidopsis transcription factor DREB2A. The lysine bordering the PEST motif can accept ubiquitin or SUMO, and such a modification can alter PEST-targeted protein cleavage, thus affecting protein stability. Along with the PEST motif-mediated protein cleavage, which can be affected by the modification of the bordering lysine, the post-translational modifications of OsNAM_{12.1} are revealed as multiple immuno-detectable bands under well-watered conditions.

[0239] For Ulp1-mediated deSUMOylation of OsNAM_{12.1} putative di-SUMOylated (—53 kD; 29+12+12) rather than the putative mono-SUMOylated (—41 kD; 29+12) OsNAM_{12.1} was preferentially deSUMOylated. Such differential/preferential activity is known for Ulp1. DeSUMOyltion visualization on 2D gel provided further evidence that OsNAM_{12.1} was SUMOylated in vivo.

[0240] Despite transcriptional upregulation, relative down-regulation of OsNAM_{12.1} protein under drought indicated conditional balance between the transcript, protein and the modified protein, necessary for drought response.

[0241] The Role of OsNAM_{12.1} in qDTY_{12.1}.

[0242] Promoter polymorphism in OsNAM_{12.1} was highly relevant to drought response and LRN, while non-synonymous CDS SNPs predicted protein structure variation (FIG. 10). Moreover, Arabidopsis CesA genes might be targets of NAC domain proteins (24). Thus, candidate gene promoters when queried for NAM/NAC binding sites revealed OsAmH_{12.1}, OsMtN3_{12.1}, OsCesA_{12.1}, OsGDP_{12.1} and OsARF_{12.1} as putative targets of OsNAM_{12.1}. Recombinant WayRarem OsNAM_{12.1} binding to these promoters was confirmed with electrophoretic mobility shift assay (EMSA), except for OsAmH_{12.1} (FIG. 13A). However, separate evidence supported OsAmH_{12.1} regulation by OsNAM_{12.1}. For example, WayRarem OsNAM_{12.1} when constitutively over-expressed in IR64 (I-OsNAM_{12.1}^{ox}), led to upregulation of OsCesA_{12.1}, OsMtN3_{12.1}, OsARF_{12.1} and OsGDP_{12.1} and down-regulation of OsAmH_{12.1} in T₂ homozygous plants under drought. The up- and down-regulation of these particular genes was similar to the observations in 481-B (FIG. 19). Similarly, the I-OsNAM_{12.1}^{ox} plants exhibited increased root and panicle branching, spikelet number and transpiration rates under drought, as in 481-B (FIGS. 11A-11E). WT IR64 and I-OsNAM_{12.1}^{ox} plants had similar TE and yield-under-drought in pot studies but under field conditions the I-OsNAM_{12.1}^{ox} plants exhibited increase in yield as seen through the number of filled spikelets (FIG. 11F). I-OsNAM_{12.1}^{ox} plants thus largely recapitulated the performance of 481-B under drought but not to similar extents, as discussed below.

[0243] The OsNAM_{12.1} is Differentially SUMOylated Under Drought.

[0244] TFs act as negative and positive regulators, like OsNAM_{12.1} most likely does for OsAmH_{12.1} and the four other co-localized target genes respectively, through post-translational modification (PTM). Vandana and WayRarem OsNAM_{12.1} lacked a phosphorylation and a SUMOylation site respectively from the potential multiple sites for the two correlated PTMs (FIG. 21). Potential multiple SUMOylation may explain the multiple immunodetection bands for OsNAM_{12.1} (FIG. 13B). SUMOylation of the recombinant OsNAM_{12.1} and deSUMOylation of the plant OsNAM_{12.1} in vitro confirmed that it could be SUMOylated (FIGS. 13C-13D) while it's in vivo SUMOylation was confirmed through 2D-immunodetection before and after treatment with SUMO protease Ulp1 (FIG. 13E) and by the use of anti-OsNAM_{12.1} and antiSUMO antibody on the same blot (FIG. 13F). Differential SUMOylation of OsNAM_{12.1} under drought was also confirmed through 2D-immunodetection (FIG. 22A). The importance of differential SUMOylation of OsNAM_{12.1} and its potential role in explaining the epistasis noted for a functional qDTY_{12.1} is discussed below. Of the various modified moieties noted for OsNAM_{12.1}, drought-mediated deSUMOylation of some (FIG. 22A) was noteworthy.

[0245] The Functional OsNAM_{12.1} Haplotype is Specific to Susceptible Genotypes.

[0246] To associate the WayRarem OsNAM_{12.1} allele with drought tolerance across genotypes, SNP composition of a 6-Kb region surrounding OsNAM_{12.1} was examined in 125 re-sequenced rice lines. Substantial SNP and indel variation was noted and 7 major haplotypes were identified at different frequencies within the five O. sativa subpopulations and wild rice (FIG. 15). The haplotype containing the two non-synonymous genic SNPs as in WayRarem was absent in the drought tolerant lines but present in 9 drought sensitive, irrigated and high-yielding indica lines. De-novo OsNAM_{12.1} sequencing from known drought tolerant lines such as Apo, N22 and Dular also did not contain the WayRarem haplotype. The WayRarem OsNAM_{12.1} haplotype, as it existed in the sturdier wild rice O. nivara and O. rufipogon (FIG. 15) was most likely selected away from an epistatic locus when selecting/breeding for high yielding, irrigated genotypes, which are mostly drought susceptible. Indeed, epistatic interaction of qDTY_{12.1} was noted with the Vandana qDTY_{2.3} and its introgression into WayRarem increased the yield of the backcross-inbred lines (BIL; WR50-6-B4) under drought.

[0247] SUMOylation of OsNAM_{12.1} May Underlie qDTY_{12.1} Epistasis.

[0248] The OsNAM_{12.1} 2 D-immunodetection patterns of WR50-6-B4, 481-B, I-OsNAM_{12.1}^{ox} and the Vandana line transformed with the WayRarem OsNAM_{12.1} (V-OsNAM_{12.1}^{ox}) revealed down-regulation of certain OsNAM_{12.1} moieties under drought, which did not happen in Vandana and WayRarem (FIG. 22A). The change in the pattern of 2D-GE spots indicated deSUMOylation when compared to the pattern in FIG. 13E, wherein the latter demonstrated the action of the deSUMOylating protease Ulp1 on OsNAM_{12.1}. These results demonstrated that drought-mediated deSUMOylation of OsNAM_{12.1} was upregulated when qDTY_{2.3}, or a functional part thereof, was present. This indicated that OsNAM_{12.1} (de)SUMOylation status at qDTY_{12.1} might be affected by the epistatic qDTY_{2.3}, or a functional part thereof. These results also indicated that although OsNAM_{12.1} transcript, protein and protein-SUMOylation were detected in WayRarem, the requisite putative deSUMOylated moieties under drought were not achieved, most likely due to the lack of qDTY_{2.3}. In Vandana, a similar lack of deSUMOylated moieties under drought, despite the presence of qDTY_{2.3}, was due to the mutations in its OsNAM_{12.1} (FIG. 21). Vandana is thus an OsNAM_{12.1} functional knock out (KO) line, amenable to complementation with the WayRarem OsNAM_{12.1} as shown through the change in the OsNAM_{12.1} 2 D pattern (FIG. 22A) and in the drought responsive morpho-physiology of 481-B and V-OsNAM_{12.1}^{ox} (FIGS. 11; 22B-22C).

[0249] Relating Drought-Specific Lateral Root Branching and OsNAM_{12.1}.

[0250] Root architecture plays an important role in drought tolerance. In order to relate LRN to OsNAM_{12.1}, the parental genotypes Vandana and WayRarem; 481-B; WR50-6-B4; and V-OsNAM_{12.1}^{ox}; plants were assessed for total root length, maximum root depth and root surface area. Under normal conditions root characteristics of the different lines were largely similar. However under simulated drought, WR50-6-B4, 481-B and V-OsNAM_{12.1}^{ox}, in that order, exhibited significant increases over Vandana and WayRarem (FIGS. 22B-22C). These results showed that the WayRarem OsNAM_{12.1} by itself, but more in concert with additional WayRarem alleles, affected root architecture under drought and that qDTY_{2.3} had a role in the process.

[0251] Candidate Genes Other than OsNAM_{12.1} have a Role in qDTY_{12.1}

[0252] T-DNA insertion-mediated knock out (KO) line for OsAmH_{12.1} and activation-tag (AT) lines for OsCesA_{12.1}, OsGDP₁₂ and OsARF_{12.1}, along with those for OsSTPK_{12.1}, OsPOle_{12.1} and OsWAK_{12.1} were identified in the TRIM collection. LRN was enhanced in all mutants (FIG. 11) but panicle branching and spikelet number was not affected (Table 4). However, AT-OsSTPK_{12.1} exhibited significantly higher number of filled grains than the WT (Table 4). These findings, in combination with the candidate gene transcript expression patterns (FIG. 19) confirm OsAmH_{12.1} as a negative and other tested candidate genes as positive regulators of LRN.

TABLE 4
Panicle branching, spikelet number, and fertility of AT/KO mutants.

[chemical structure]

*Panicle length measured in cm. All numbers, except in parentheses, are average values based on the number of panicles sampled from the number of plants (the number in parentheses).
Activation tag (AT) or knock out (KO) status was confirmed through qRTPCR.
1°Br., indicates the average number of primary branches per panicle.
2°Br., indicates the average number of secondary branches per panicle.
# Spike, indicates the average number of spikelets per primary or secondary branches.
ND indicates ‘Not Determined’ due to low fertility.
Light grey shading denotes values significantly less than the WT and dark grey shading denotes values significantly higher than the WT.
This data from the greenhouse pot studies is an indication that OsSTPK_{12.1} has a role in increasing the fertility.

[0253] Yet another evidence for the multigenic nature of wDTY_{12.1} was the lack of increase in LRN under drought in the intra-QTL recombinant plants. Allele-specific genotyping for candidate genes revealed that intra-QTL recombinant plants of lines 917-B and 937-B were similar to 481-B except for missing the WayRarem allele of OsGPDP_{12.1} in both the lines while 937-B also lacked the WayRarem allele for OsSTPK_{12.1} (FIG. 16A). Both lines showed significant reduction in lateral root growth compared to 481-B (FIG. 16B). Field-based analysis revealed better yield for 937-B under no, mild, and moderate drought, but increased performance of 917-B, which contained the OsSTPK_{12.1}, under severe drought (FIG. 16C). These data indicated that OsGPDP_{12.1} is also involved in lateral root growth, while OsSTPK_{12.1} contributes not just to lateral root growth but also stabilizes yield under severe drought. Such a role for OsSTPK_{12.1} is supported by higher grain filling in the OsSTPK_{12.1} AT-mutant.

[0254] Unlike most QTLs that suffer from lack of validity in multiple locations and genotypes, qDTY1_{12.1} was valid in multiple locations, genotypes, eco-systems, and development stages. Reiterative field validation of the line 481-B over multiple years and seasons confirmed its stability and revealed yield advantage even under well-watered conditions.

[0255] Field-based characterization of 481-B revealed that multiple morpho-physiological traits were favorably affected including critical traits of days to flowering, transpiration efficiency and spikelet number and fertility. However, the one trait highly favored for drought tolerance, i.e. deeper roots, was not seen in 481-B. Instead, profuse root branching to increase LRN was observed. Various root traits explored for drought tolerance in rice have been reviewed in the literature, but LRN was never a main contender. Results presented herein show drought-specific increase in LRN was a distinguishing feature of 481-B in soil and even in PEG simulated water deficit in vitro (FIGS. 2E-2F, 16B, 22B).

[0256] The large-effect of qDTY_{12.1}, combined with the evidence of its influence on multiple traits, showed a role for multiple genes, distributed in sub-QTLs. Fine mapping studies with the SSR and putative candidate gene-based markers demarcated 4 fractions within qDTY_{12.1} (FIG. 2A) and showed the importance of the underlying candidate genes. Initial validity of the candidate gene selection was shown by results on sequence polymorphism and drought-mediated changes in the expression of these genes (FIG. 19).

[0257] OsNAM_{12.1} was considered a prime candidate gene herein because i) NAM/NAC TFs affect root architecture and drought tolerance; ii) phylogenetically it belonged to the ONAC1 clade, none of the eight members of which have been studied; iii) its promoter indel contained auxin and ethylene response elements important in drought response and root growth (FIG. 10D); and iv) its CDS SNPs changed a lysine (K7N) and a serine (5109N) which predicted altered SUMOylation and phosphorylation and a weaker fitting structural RMSD for Vandana than WayRarem to the rice stress-inducible NACl (FIGS. 10B-10C). Selection of OsNAM_{12.1} as the major candidate gene was justified when I-OsNAM_{12.1}^{ox} plants largely recapitulated the morpho-physiology of 481-B (FIG. 11). Additionally, V-OsNAM_{12.1}^{ox} plants also exhibited the expected changes in LRN (FIGS. 22A-22B) and in panicle branching.

[0258] Multiple glycosylation, phosphorylation, and SUMOylation sites were present in OsNAM_{12.1} (FIG. 21). Recombinant OsNAM_{12.1} was SUMOylated with SUMO2 in vitro but not with SUMO1 or SUMO3 (FIG. 13D). Protein SUMOylation under stress by SUMO1/2 but not SUMO3 was earlier noted in Arabidopsis indicating heterogeneity and plant-, trait- or protein-specificity for the protein: SUMO interaction. Further, the two-dimensional immunodetection results with anti-OsNAM_{12.1} and anti-SUMO antibodies showed identical spots and supported in vivo SUMOylation of OsNAM_{12.1} (FIG. 13F). Multiple immunodetectable OsNAM_{12.1} bands/spots seen in Vandana and WayRarem under well-watered conditions represented various PTM forms of OsNAM_{12.1}. Certain spots (indicated by arrows in FIG. 22A) were down-regulated under drought in a manner that indicated deSUMOylation when compared to FIG. 13E, when the latter shows SUMO protease Ulp1 treatment of OsNAM_{12.1}.

[0259] Transcription factor (de)SUMOylation is known to alter its role between activator and repressor. Results of candidate gene expression, EMSA, and SUMOylation combined with TRIM mutant analyses showed such a dual role for OsNAM_{12.1}, such that it repressed OsAmH_{12.1} but activated four other co-localized target genes. Since OsNAM_{12.1} SUMOylation was observed in all samples (FIG. 13B), the effective content of one or more particular forms of OsNAM_{12.1} is critical. However, results demonstrated that SUMOylation notwithstanding, along with the known effect of NAM/NAC TFs on increasing lateral roots under drought, OsNAM_{12.1} also affected panicle branching and spikelet number.

[0260] Two major haplotypes were identified for OsNAM_{12.1} in each of the subpopulations, with the exception of temperate japonica where all 19 genotypes carried a single OsNAM_{12.1} haplotype. This level of variation is significantly higher than that reported in other genes and demarks rapid and recent evolution across this locus and a high level of evolutionary plasticity in response to variable selection pressures. One of the indica-specific haplotypes displayed two non-synonymous SNPs in the CDS that are conserved between WayRarem and 10 indica genotypes, including IR64, indicating that the favorable qDTY_{12.1} allele is of indica origin. These results showed that qDTY_{12.1} originated from the high-yielding but drought susceptible WayRarem genotype. IR64 does not display drought tolerance characters of qDTY_{12.1}. The lagging effect on yield in I-OsNAM_{12.1}^{ox} plants compared to 481-B implicated one or more of the other nine genes in increasing the number of filled spikelets as opposed to OsNAM_{12.1} increasing the number of spikelets per se under drought. Indeed, AT-OsSTPK_{12.1} exhibited larger number of filled grains despite no changes in the number of branches in the panicle.

[0261] The functional OsNAM_{12.1} being restricted to susceptible genotypes indicated epistasis, which was identified with the Vandana qDTY_{2.3}, or a functional part thereof. The qDTY_{2.3} locus contained an ubiquitin protease, which acts as a deSUMOylating protein. Without wishing to be bound to any particular theory, the functional model for qDTY_{12.1} is that the Vandana OsNAM_{12.1} does not work due to the SNPs that cause K7N and 5109N alterations and the P223 insertion (this latter P insertion was not noticed in any of the 125 re-sequenced genomes), while the WayRarem OsNAM_{12.1} does not work, due to altered ubiquitin protease or any other gene at qDTY_{2.3} that facilitates deSUMOylation. Further, V-OsNAM_{12.1}^{ox} and WR50-6-B4 plants exhibited drought-mediated deSUMOylation of OsNAM_{12.1} and LRN increased similar to that in 481-B and I-OsNAM_{12.1}^{ox} plants (FIGS. 11A-10B, 16B, 22B-22C), showing a direct relationship between OsNAM_{12.1} deSUMOylation and LRN increase.

[0262] Low level of intra-QTL recombination of 2.7% (52/1900) instead of the expected 7% for a 1.75 Mb region (1 Mb=4 cM), due to its proximity to the centromere, underscores the practical value of qDTY_{12.1}.

[0263] A breeding strategy based on SNP markers for the 10 CGs will fast track ongoing efforts to introgress drought tolerance into popular, local varieties. Success with this robust LEQ, as opposed to the search for a master-regulator, to address the complex trait of drought tolerance underscores its practical value. It supports the much espoused meaningful complementation of field-based classical breeding and physiology with molecular biology to ameliorate food scarcity, hunger and poverty through rice science.

[0264] The present invention provides molecular markers, (i.e. including marker loci and nucleic acids corresponding to (or derived from) these marker loci, such as probes and amplification products) useful for genotyping plants, correlated with the qDTY_{12.1} QTL in rice. Such molecular markers are useful for selecting plants that carry the drought tolerance QTL or that do not carry the drought tolerance QTL. Accordingly, these markers are useful for marker assisted selection (MAS) and breeding of drought tolerant lines and identification of non-tolerant lines. Markers which may be used include: RM28048 (forward primer: SEQ ID NO: 22; reverse primer: SEQ ID NO: 23); RM28076 (forward primer: SEQ ID NO: 24; reverse primer: SEQ ID NO: 25); RM28089 (forward primer: SEQ ID NO: 26; reverse primer: SEQ ID NO: 27); RM28099 (forward primer: SEQ ID NO: 28; reverse primer: SEQ ID NO: 29); RM28130 (forward primer: SEQ ID NO: 30; reverse primer: SEQ ID NO: 31); RM511 (forward primer: SEQ ID NO: 32; reverse primer: SEQ ID NO: 33); RM1261 (forward primer: SEQ ID NO: 34; reverse primer: SEQ ID NO: 35); RM28166 (forward primer: SEQ ID NO: 36; reverse primer: SEQ ID NO: 37); RM28199 (forward primer: SEQ ID NO: 38; reverse primer: SEQ ID NO: 39); and Indel-8 (forward primer: SEQ ID NO: 60; reverse primer: SEQ ID NO: 61).

[0265] Epistasis occurs where the expression of one gene depends on the presence of one or more modifier genes. Under DS, epistasis between WayRarem qDTY_{12.1} and Vandana qDTY_{2.3} increased yield. Several candidate genes at the epistatic QTL_{2.3} on chromosome 2 have been identified. These include LOC_Os02g45580, LOC_Os02g45670, LOC_Os02g45700, LOC_Os02g45710, LOC_Os02g45750, LOC_Os02g45770, LOC_Os02g45810, LOC_Os02g46100, LOC_Os02g46140, LOC_Os02g46260, LOC_Os02g46320, LOC_Os02g46340, LOC_Os02g46350, LOC_Os02g46360, LOC_Os02g46600, LOC_Os02g46650, LOC_Os02g46690, LOC_Os02g46700, LOC_Os02g46720, LOC_Os02g46770, LOC_Os02g46780, LOC_Os02g46910, and LOC_Os02g46940.

[0266] In particular embodiments, qDTY_{12.1}, or a functional part thereof, is bred into a variety of rice having a functional qDTY_{2.3}. In another embodiment, both qDTY_{12.1} and qDTY_{2.3}, or functional parts thereof, are bred into a recipient variety. In yet other embodiments, one or more of the candidate genes at the epistatic QTL_{2.3} are expressed in a rice plant along with QTL_{12.1}, or one or more of the candidate genes at QTL_{12.1} identified above.

### Example 2

### Complexity of Drought Tolerance—Proteomic and Targeted Metabolite Analysis of Field Proven Near Isogenic Lines of a QTL for Rice Yield Under Stress

[0267] Plant Material and Growing Conditions

[0268] Field experiments were conducted at the International Rice Research Institute (IRRI, Los Baños, Laguna, 14° 10′11.81″N, 121° 15′39.22″E) during a dry season. Seeds of qDYT_{12.1} 481-B, generated as described above, and those of the parents Vandana and WayRarem were directly sown into rotovated soil at a rate of 2.0 g m-1 into plots of 3 rows×3 m, with 3 replicates per genotype in a randomized complete block design. The late flowering WayRarem was sown 20 days before the other genotypes in order to synchronize drought stress with flowering stage. Two treatments were included: a well-watered (WW) treatment in which sprinkler irrigation was applied 3 times per week throughout the study, and a drought stress (DS) treatment in an automated field rainout shelter in which irrigation was stopped at 35 days after the qDTY_{12.1} NILs were sown. At 71 days after sowing, developing spikelets, flag leaves, and root crowns of 481-B and Vandana were sampled for metabolomics and proteomics analysis, wrapped in aluminum foil, and placed directly into liquid nitrogen before storing at −80° C. Developing spikelets, flag leaves, and root crowns of WayRarem were subsequently sampled at 113 days after it was sown. Soil water potential in the DS treatment was monitored by tensiometers (Soilmoisture Equipment Corp., CA, USA; one per replicate) installed at a depth of 30 cm. From the date that WayRarem plots were sown until harvest, the ambient temperature averaged 23.4-30.8° C. (min-max), relative humidity averaged 85.8%, the crop received 1750 MJ m-2 solar radiation, and pan evaporation totaled 552 mm.

[0269] Measurements of Photosynthesis and Stomatal Conductance.

[0270] The field experiment was conducted at the International Rice Research Institute (IRRI, Los Baños, Laguna, 14° 10′11.81″N, 121° 15′39.22″E) during the dry season. Using a LI-6400 portable gas exchange system (Li-Cor Inc., Lincoln, Nebr.), light response curves were conducted in the stress and control treatments for Vandana and 481-B. The CO2 response curves were also conducted on these two treatments. Settings for all measurements were based on ambient conditions and included a leaf temperature of 30° C. and a flow rate to maintain relative humidity at 65%. The CO2 level was set to 400 ppm for the light response curves, and the light level was set to 1000 μmol m-2 s-1 for the CO2 response curves.

[0271] Protein Extraction and Separation by 1-DE.

[0272] Protein samples were extracted from the plant material using the Tris method. Flag leaf, root and spikelets (100 mg) from the three genotypes were pulverized with liquid nitrogen into fine powder to which 0.7 ml of Tris-Cl buffer (pH 8.0) was added. Seven (7) μl of protease inhibitor cocktail (Sigma-Aldrich) was added to prevent endogenous protease digestions. Samples were then allowed to incubate on ice while shaking for 2 hours. After incubation, they were spun at 17900×g (13000 rpm) for 15 minutes and the supernatant was collected. Quantification for all the samples was done using the Bradford method. Samples were run through SDS-PAGE under denaturing conditions as described in the Laemmli method (Laemmli, 1970). A total of 20 μm of protein sample was loaded per well. Loading dye with SDS and β-mercaptoethanol was added to each sample. They were then placed in a hot water bath for 5 minutes, and cooled to room temperature before loading. Gels were run at constant current of 15 mA for 2 hours per gel, and stained with Coomassie Brilliant Blue (G-250) for 24 hours, and destained for another 2 hours before tryptic digestion.

[0273] In-Gel Digestion of Protein & Tandem Mass Tag (TMT) Labeling.

[0274] Protein bands were excised and collected from the three independent replicate gels manually, and cut into small pieces. The gel pieces were washed twice with 50 μL of 50% acetonitrile (ACN)/50% 200 mM ammonium bicarbonate (ABC) for 5 min and shrunk with 100% ACN until the gels turned white; the gels were then dried for 5 min in a concentrator (miVac, Genevac, UK). The gel pieces were rehydrated at room temperature in 15 μL of 50 mM ABC (37° C., 4 min). An equivalent volume (15 μL) of trypsin (Promega, USA) solution (20 ng/4 in 50 mM ABC) was then added, and the gel pieces were incubated at 37° C. for at least 16 h. After digestion, the digests were extracted from gel slices by using 0.1% formic acid in 50% ACN. All extracts were dried in concentrator. TMT labeling was performed on each aliquot with Tandem Mass Tags (TMT) with respective reporters at m/z=126.1, 127.1, 128.1, 129.1, 130.1 and 131.1 Thomson (Th) in 40.2 μL CH3CN. After 60 min of reaction at RT, 8 μL hydroxylamine 5% (w:v) was added in each tube, and mixed for 15 min. The aliquots were then combined and the pooled sample was evaporated under vacuum. The sample was then dissolved in 1894 μL H2O/TFA 99.9%/0.1% before LC-MS analysis.

[0275] Nano LC-MS/MS Analysis.

[0276] Each digested peptide mixture (5 μL) for nano-LC/MS/MS analyses were introduced into the mass spectrometer via high-performance liquid chromatography using a 1200 series binary HPLC pump (Agilent, CA, USA) and a FAMOSTM well-plate microautosampler (LC Packings). For each analysis, sample was loaded into a 2 cm×75 μm i.d. trap column packed in-house with C18 resin (Magic C18AQ, 5 mm, 200 Å; Michrom, Bioresources, CA, USA). The trap column was connected to an analytical column (11 cm×75 mm i.d.) and the columns were rigidly packed in-house with C18 resin (Magic C18AQ, 5 μm, 100 Å). Mobile phase A consisted of 0.1% formic acid and mobile phase B consisted of 0.1% formic acid in 100% ACN. The flow rate was ˜250 nL/min under an in-house split flow system. Each reversed-phase step began with 5% ACN for 10 min, a gradient of 5%-40% ACN for 75 min, 40%-85% ACN for 5 min, 85% ACN for 10 min, and then re-equilibrated with 5% ACN for 20 min. Mass spectrometric analyses were performed on a LTQ XL linear ion trap mass spectrometer (ThermoFisher Scientific, San Jose, Calif., USA). A full-mass scan was performed between m/z 350 and 2000, followed by MS/MS scans of the five highest-intensity precursor ions at 35% relative collision energy. Dynamic exclusion was enabled with a repeat count of 1, exclusion duration of 3 min, and a repeat duration of 30 s.

[0277] Protein Identification.

[0278] The acquired MS/MS spectra were searched against SwissProt protein database 56.8 (release of 10 Feb. 2009) using the Mascot Daemon version 2.2.2 and Oryza sativa was chosen for the taxonomic category. Peptide mass tolerance and fragment tolerance were set at 2 Da and 0.5 Da, respectively. The initial search was set to allow for up to two missed tryptic cleavages. A Decoy database was performed to determine false positive rates. The false positive rates were controlled below 5% by setting p value at 0.025.

[0279] Functional Annotation.

[0280] Identified proteins with one or more than one peptide with MASCOT score greater than 40 were immediately accepted. Single peptides with MASCOT score less than 40 were deleted from the analysis to avoid false positives; 23, 21 and 15 single peptides were deleted from flag leaf, panicle and root respectively. The MSU TIGR v7.0 locus identifiers of the remaining proteins were retrieved from ID mapping tool in UniProtKB for giving them as input in MAPMAN. Finally a total of 915 proteins, of which 304, 407 and 204 proteins with TIGR locus IDs from flag leaf, panicle and root were used for further functional annotation using MAPMAN. The proteins were mapped against the already available rice mapping file and mapped proteins were classified into 24 functional categories based on MAPMAN BINS described by Thimm et al. (2004).

[0281] Starch Estimation.

[0282] Starch was estimated by measuring the NADH absorption at 340 nm which was generated during the conversion of glucose 6 phosphate to 6-phosphogluconate by the enzyme, glucose 6 phosphate dehydrogenase (Ernst and Arditti, 1972). The pellet obtained (from 15-20 mg of seed or leaf) after ethanolic extraction was used for starch estimation by HCl (Hydrochloric acid). The pellet was dissolved in 2N HCl (1.5 mL) and incubated at 95° C. for 1 h. The resulting mixture was directly used for glucose estimation after centrifugation at 13,000 g for 5 min. A mixture of 750 μL Imidazole buffer (pH 6.9) consisting of 2 mM NAD and 1 mM ATP was incubated at room temperature for 10 minutes in a disposable plastic cuvette along with 5-10 μl of the extract and 2 μL of glucose 6 phosphate dehydrogenase (2 units). After recording the initial absorbance of the mixture at 340 nm, 10 μL of hexokinase (8 units) solution was added to the mixture and incubated for further 25 min and the absorbance was recorded at 340 nm. A standard curve was prepared using starch (standards) from maize kernel.

[0283] Sugar Estimation

[0284] Lyophilised powdered plant sample was extracted three times with 80% ethanol by incubating at 60° C. for 30 min in a thermomixer. The supernatant obtained after centrifugation at 13,000 g for 10 min at 4° C. was evaporated to dryness using a centrifuge vacuum evaporator. The dried material was re-dissolved in deionized water and vortexed thoroughly. Contents were then filtered (Ultrafree-MC Membranes; Millipore) and the filtrate obtained was used for estimation of sugar analysis by HPAEC method.

[0285] Soluble sugars were analyzed by ion chromatography, HPAEC-PAD (High Performance Anion Exchange Chromatography-Pulsed Amperometric Detection). Chromatographic analysis was conducted with a Dionex IC system consisting of an autosampler AS 50, a gradient pump GP 50, and an electrochemical detector ED 40 equipped with a thin-layer-type amperometric cell. The cell comprised a gold working electrode and an Ag/AgCl reference electrode. Data acquisition and processing were accomplished with the Dionex Chromeleon 6.70 software. Chromatographic separation was carried out with the analytical column, CarboPac PA 20 in conjunction with a guard column and an Ion 1 Pac trap guard column. Column temperature was maintained at 35° C. in a column oven (STH-585). Analytes were separated with isocratic elution using 50% A (150 mM NaOH) and 50% B (water) as eluents at a flow rate of 0.3 mL min-1 for 15 min. Analyte detection was achieved by applying a quadrupole-potential waveform on the gold electrode (E1=0.1 V from 0 to 0.4 ms; E2=2.0 V from 0.41 to 0.42 ms; E3=0.6 V from 0.42 to 0.43 ms; E4=−0.1 V from 0.4 to 0.5 ms). The analytical data quality was controlled by standard addition methods.

[0286] Estimation of Amino Acids by HPLC

[0287] Lyophilised powdered plant sample was extracted three times with 80% ethanol by incubating at 60° C. for 30 minutes in a thermomixer. The supernatant obtained after centrifugation at 13000 g for 10 minutes at 4° C. was evaporated to dryness using a centrifuge vacuum evaporator. The dried material was then re-dissolved in the deionized water and vortexed thoroughly. Contents were then filtered (Ultrafree-MC Membranes; Millipore) and the filtrate obtained was used for estimation of amino acids. The reagents and solutions required for sample derivatization were available in the kit provided by Waters (AQC dry powder, acetonitrile for dissolving the reagent and borate buffer). Derivatization was carried out according to the instructions provided in the manual, AccQ-Tag method (Meyer et al., 2008). Briefly, AQC reagent powder was dissolved in 1 mL of acetonitrile which was approximately 3.0 mg/mL, vortexed thoroughly and incubated at 50° C. for 10 min. A mixture of standard amino acids except asparagine and glutamine was available from Sigma (0.5 mM in 0.01 M HCl). A working solution of 50 pmol/μL of each amino acid was made using 0.01 M HCl after adding asparagine and glutamine separately. About 10 μL of the fluorescent dye reagent was added to a small eppendorf (0.5 mL) containing 10 μL of sample and 80 μL of borate buffer (0.2M, pH 8.8). The contents were thoroughly mixed immediately and incubated at 50° C. for 10 min. and analyzed by HPLC. Similarly, standard was prepared by derivatizing with different volumes of the working standard solution. Unused reagent could be stored at −20° C. for several weeks. Before the chromatographic analysis, the system was equilibrated with 100% eluent A (140 mM sodium acetate and 7 mM triethanolamine) and the column temperature was set to 37° C. Fluorescence detector was set at 248 nm wavelength for excitation and 395 nm for absorbance. Chromatography was carried out using a Dionex HPLC system (Summit) consisting of a gradient pump (P680), a degasser module, an autosampler (ASI-100) and a fluorescent detector (RF 2000). Data acquisition and processing was accomplished with Dionex Chromeleon 6.70 software. The gradient was accomplished with eluent A, B and C representing buffer, acetonitrile and water, respectively. Analytes were separated on a reversed-phase analytical column (AccQ Tag) coupled to a guard column (Nova-Pak C18). The column temperature was maintained at 37° C. throughout the measurement and the flow rate to 1 mL/min. The gradient was produced by the following concentration changes, t=0, 100% A; t=0.5 min, 99% A and 1% B; t=27.5 min, 95% A, and 5% B; t=28.5 min, 91% A and 9% B; t=44.5 min, 82% A, 18% B; t=47.5 min, 60% B and 40% C; t=50.5 min, 100% A and t=60 min, 100% A. During the whole run, the gradient curve was always maintained at 6. Free proline content was also assayed using the ninhydrin assay (Bates et al., 1973)

[0288] Carbon and Nitrogen Analysis.

[0289] Carbon and nitrogen analysis was carried out using the elemental analyzer (vario EL III). Instrument was switched on about 3-5 hours before actual analysis and the measurement was carried out in CN mode. About 3 to 4 mg of oven dried sample was weighed in aluminum capsule, folded and placed in the autosampler. During measurement, the capsule enclosing the sample falls into a combustion chamber with excess oxygen kept at 900° C., where it is mineralized with the help of some catalysts. Various gases formed (CO2, H₂O and NOx) then passes through a silica tube packed with copper granules held at about 500° C. (reduction tube) where the remaining oxygen is bound and nitric/nitrous oxides are reduced to N2. The leaving gas stream includes analytically important CO2, H2O, N2 and SO2. All gases are removed at appropriate traps leaving the analytically important CO2 and N2 which are subsequently detected with a thermal conductivity detector. High purity helium (Quality 5.0) is used both as a carrier and reference gas. Blank values are obtained from empty aluminum capsules and calibration is done by elemental analysis of standard substances supplied by the manufacturer.

[0290] Quantitative PCR.

[0291] Quantitative RT-PCR analysis of few important selected proteins was performed. The primers were designed using Primer 3 (FIG. 34). All the three tissues harvest for the proteomic and the metabolomic measurements were rapidly placed in liquid nitrogen and grinded into powder, and immediately transferred to TRIzol Reagent (Invitrogen, Life Technologies). The total RNA was then extracted according to the manufacturer's recommendations. The cDNA was synthesized immediately after the RNA was extracted (ImProm-II™ Reverse Transcription System, Promega, USA). The quantitative PCR was performed with a Applied Biosystem 7500 Fast system (Applied Biosystem, 1 USA) using the SYBR® Select Real-time PCR Master Mix (Applied Biosystem, USA). Each gene was detected in quadruple simultaneously with the actin gene as an internal control.

[0292] Results

[0293] TMT DATA Analysis.

[0294] In the TMT data, the identified proteins represented comparative abundance in the 481-B with respect to that in Vandana. Proteins represented by a single peptide and with a MASCOT score of <40 were eliminated from consideration. A total of 332, 430 and 229 proteins (991 in all) were identified respectively from flag leaf, spikelets and roots as differentially expressed between Vandana and 481-B (Tables 5-7). Maximum number of proteins unique to a tissue was identified in the spikelets (167) followed by roots (106) and flag leaf (91; FIG. 28A). Flag leaf and spikelets shared maximum number of common proteins (206) between themselves. Proteins on the final list were represented as TIGR Locus identifiers and mapped onto different functional categories using the MAPMAN tool. A dynamic range of proteins was successfully identified as indicated by the coverage of proteins from a broad range of isoelectric point (4.27-11.47) and molecular weight (7 kDa-285 kDa). These were mapped onto the rice-mapping file in MAPMAN, and assigned to respective BINS (FIG. 30B). Following the MapMan ontology (Thimm et al., 2004), proteins were sorted into 26 functional categories (Tables 5-7). Considering the three tissues together, 100 proteins accounting for nearly 10% of the total identified, belonged to the group ‘protein metabolism’ (Tables 5-7). Other functional categories containing high number of proteins were redox proteins (9.31%), photosynthesis (8.55%), and stress proteins (6.37%).

[0295] Protein and Metabolite Factors Responsible for the Drought-Induced Lateral Root Growth Phenotype of qDTY12.1.

[0296] Increased lateral root growth and branching was observed in the qDTY₁₂ 481-B in comparison to Vandana under drought stress (Example 1). Roots help in continued acquisition of water and nutrients and increased lateral root and root hair proliferation has been implicated in plant sustenance under drought. Proteins implicated in the increased lateral root growth of the 481-B under drought were identified. For example, actin, tubulins and expansins were upregulated in the 481-B compared to Vandana, while actin-depolymerizing factor (ADF) was down regulated in the 481-B (FIG. 23). Actin is a ubiquitous cytoskeletal protein that is essential for a variety of purposes including cell division, and maintenance of cell integrity. Tubulins, another class of cytoskeletal proteins are functional in cell division and expansins aid in loosening the cell wall, allowing growth or expansion of the cell especially under low water potential when expansin expression is induced to aid in the cell wall plasticity. Inhibition of ADF is known to be beneficial for cell expansion and organ growth, thus ADF reduction in the 481-B facilitates lateral root growth. In conjunction with cytoskeletal and structural proteins being favorably expressed, Glyceraldehyde-3-phosphate dehydrogenase, enolase and glucose-6-phosphate isomerase belonging to the glycolytic pathway were more abundant in the roots of the 481-B (FIG. 24) indicating a favorable energy supply situation in the roots of the 481-B during stress.

[0297] Comparatively more sucrose, fructose and glucose and less starch existed in the roots of the 481-B compared to Vandana (FIGS. 29A-29D). Freixes et al., (2002) demonstrated a high correlation between localized hexose concentration and fast growing, highly branched roots. Increase in the hexose concentration in the root increased respiration rates in wheat (Bingham and Stevenson, 1993). Thus, more sugars and less starch in the 481-B roots show the availability of the sugars more towards the energy needs for lateral root growth. Sugars are also used towards synthesizing cellulose for root growth. A cellulose synthase (OsCesA_{12.1}: LOC_Os12g29300) is one of the candidate genes in qDTY_{12.1} and it is comparatively more upregulated under drought in the 481-B roots, while an activation tag T20 DNA insertion mutant overexpressing OsCesA_{12.1} exhibited increased lateral roots under water deficit (Example 1). Therefore, the sugars in the roots of the 481-B are utilized to provide the energetic and structural component to drive lateral root growth, while their conversion into higher amounts of starch in Vandana may not be helpful. Starch accumulation in roots under drought stress occurred in a variety of plants and was correlated with impaired growth (Galvez et al., 2011), as in Vandana.

[0298] Increased accumulation of serine was also observed in the roots of the NILs compared to the parents during stress (FIGS. 29G-291). There is evidence that serine is involved in plant responses to various environmental stresses (Ho & Saito, 2001). Waditee et al., (2007) designed a strategy to increase the serine content of Arabidopsis to enhance plant tolerance to different abiotic stress, by transferring the 3-phosphoglycerate dehydrogenase gene. This led to induction of the betaine synthesis pathway and thus increased stress tolerance. An increased expression of 3-phosphoglycerate dehydrogenase and its content in the roots of the 481-B (FIGS. 23, 29K) was observed. These results demonstrate the involvement of this gene in the production of serine. Serine produced is involved directly or indirectly in generation of osmolytes like betaine, thus increasing 481-B capacity to counter stress. Serine also acts as a precursor of other limited essential amino acids in crop plants, such as methionine and cysteine.

TABLE 5
The complete set of proteins identified in flag leaf of Vandana and the 481B NIL (in triplicates),
represented as fold increase in the NIL compared to Vandana during drought stress.

| | | | Log 2 | | |
|---|---|---|---|---|---|
| Gene Ontology | MapMan Bin Description | Locus Id's | Ratio | | MSU v7.0 description |
| Photosystems | PS.lightreaction.photosystem | LOC_Os07g04840 | 0.6617 | Downregulated | PsbP, putative, expressed |
| | II.PSII polypeptide subunits | | | | |
| | PS.lightreaction.photosystem | LOC_Os01g43070 | 1.2892 | Downregulated | psbP-related thylakoid lumenal protein |
| | II.PSII polypeptide subunits | | | | 4, chloroplast precursor, putative, |
| | | | | | expressed |
| | PS.lightreaction.photosystem | LOC_Os01g31690 | −0.4935 | Upregulated | oxygen-evolving enhancer protein 1, |
| | II.PSII polypeptide subunits | | | | chloroplast precursor, putative, |
| | | | | | expressed |
| e-Carrier | PS.lightreaction.other electron | LOC_Os06g01210 | 0.5169 | Downregulated | plastocyanin, chloroplast precursor, |
| | carrier (ox/red).plastocyanin | | | | putative, expressed |
| | PS.lightreaction.other electron | LOC_Os08g01380 | −1.1488 | Upregulated | 2Fe-2S iron-sulfur cluster binding |
| | carrier (ox/red).ferredoxin | | | | domain containing protein, expressed |
| | PS.lightreaction.other electron | LOC_Os06g01850 | 1.5308 | Downregulated | ferredoxin--NADP reductase, |
| | carrier (ox/red).ferredoxin | | | | chloroplast precursor, putative, |
| | reductase | | | | expressed |
| | PS.lightreaction.other electron | LOC_Os02g01340 | −0.9887 | Upregulated | ferredoxin--NADP reductase, |
| | carrier (ox/red).ferredoxin | | | | chloroplast precursor, putative, |
| | reductase | | | | expressed |
| | PS.lightreaction.other electron | LOC_Os02g22260 | 0.0792 | Downregulated | fruit protein PKIWI502, putative, |
| | carrier (ox/red).ferredoxin | | | | expressed |
| | oxireductase | | | | |
| Photorespiration | PS.photorespiration.glycolate | LOC_Os04g53210 | 0.6346 | Downregulated | hydroxyacid oxidase 1, putative, |
| | oxydase | | | | expressed |
| | PS.photorespiration.glycolate | LOC_Os07g05820 | −0.1254 | Upregulated | hydroxyacid oxidase 1, putative, |
| | oxydase | | | | expressed |
| | PS.photorespiration.aminotrans | LOC_Os08g39300 | −0.0553 | Upregulated | aminotransferase, putative, expressed |
| | ferases peroxisomal | | | | |
| | PS.photorespiration.glycine | LOC_Os06g40940 | −0.0997 | Upregulated | glycine dehydrogenase, putative, |
| | cleavage.P subunit | | | | expressed |
| | PS.photorespiration.glycine | LOC_Os10g37180 | −0.8185 | Upregulated | glycine cleavage system H protein, |
| | cleavage.H protein | | | | putative, expressed |
| | PS.photorespiration.serine | LOC_Os03g52840 | −0.1907 | Upregulated | serine hydroxymethyltransferase, |
| | hydroxymethyltransferase | | | | mitochondrial precursor, putative, |
| | | | | | expressed |
| | PS.photorespiration. | LOC_Os02g01150 | −0.4586 | Upregulated | erythronate-4-phosphate |
| | hydroxypyruvate reductase | | | | dehydrogenase domain containing |
| | | | | | protein, expressed |
| Calvin Cycle | PS.calvin cycle | LOC_Os01g19740 | −1.4999 | Upregulated | calvin cycle protein CP12, putative, |
| | | | | | expressed |
| | PS.calvin | LOC_Os06g45710 | 0.5105 | Downregulated | phosphoglycerate kinase protein, |
| | cycle.phosphoglycerate kinase | | | | putative, expressed |
| | PS.calvin | LOC_Os05g41640 | −0.4569 | Upregulated | phosphoglycerate kinase protein, |
| | cycle.phosphoglycerate kinase | | | | putative, expressed |
| | PS.calvin | LOC_Os02g07260 | 0.8231 | Downregulated | phosphoglycerate kinase protein, |
| | cycle.phosphoglycerate kinase | | | | putative, expressed |
| | PS.calvin cycle.GAP | LOC_Os03g03720 | 0.2524 | Downregulated | glyceraldehyde-3-phosphate |
| | | | | | dehydrogenase, putative, expressed |
| | PS.calvin cycle.GAP | LOC_Os04g38600 | −0.1382 | Upregulated | glyceraldehyde-3-phosphate |
| | | | | | dehydrogenase, putative, expressed |
| | PS.calvin cycle.GAP | LOC_Os08g34210 | −0.6305 | Upregulated | aldehyde dehydrogenase, putative, |
| | | | | | expressed |
| | PS.calvin cycle.TPI | LOC_Os01g05490 | −1.3238 | Upregulated | triosephosphate isomerase, cytosolic, |
| | | | | | putative, expressed |
| | PS.calvin cycle.TPI | LOC_Os09g36450 | 0.6892 | Downregulated | triosephosphate isomerase, chloroplast |
| | | | | | precursor, putative, expressed |
| | PS.calvin cycle.aldolase | LOC_Os11g07020 | −0.9809 | Upregulated | fructose-bisphospate aldolase isozyme, |
| | | | | | putative, expressed |
| | PS.calvin cycle.aldolase | LOC_Os01g67860 | 0.6298 | Downregulated | fructose-bisphospate aldolase isozyme, |
| | | | | | putative, expressed |
| | PS.calvin cycle.aldolase | LOC_Os05g33380 | 0.1392 | Downregulated | fructose-bisphospate aldolase isozyme, |
| | | | | | putative, expressed |
| | PS.calvin cycle.aldolase | LOC_Os06g40640 | 0.3000 | Downregulated | fructose-bisphospate aldolase isozyme, |
| | | | | | putative, expressed |
| | PS.calvin cycle.FBPase | LOC_Os03g16050 | −0.0685 | Upregulated | fructose-1,6-bisphosphatase, putative, |
| | | | | | expressed |
| | PS.calvin cycle.FBPase | LOC_Os01g64660 | 0.3439 | Downregulated | fructose-1,6-bisphosphatase, putative, |
| | | | | | expressed |
| | PS.calvin cycle.transketolase | LOC_Os06g04270 | −0.1232 | Upregulated | transketolase, chloroplast precursor, |
| | | | | | putative, expressed |
| | PS.calvin cycle.seduheptulose | LOC_Os04g16680 | −0.7328 | Upregulated | fructose-1,6-bisphosphatase, putative, |
| | bisphosphatase | | | | expressed |
| | PS.calvin cycle.RPE | LOC_Os03g07300 | −1.8252 | Upregulated | ribulose-phosphate 3-epimerase, |
| | | | | | chloroplast precursor, putative, |
| | | | | | expressed |
| | PS.calvin cycle.PRK | LOC_Os02g47020 | −0.4390 | Upregulated | phosphoribulokinase/Uridine kinase |
| | | | | | family protein, expressed |
| | PS.calvin cycle.rubisco | LOC_Os11g47970 | 0.1846 | Downregulated | AAA-type ATPase family protein, |
| | interacting | | | | putative, expressed |
| Thylakoid | not assigned.unknown | LOC_Os01g05080 | 0.8638 | Downregulated | thylakoid lumenal protein, putative, |
| Proteins | | | | | expressed |
| | not assigned.unknown | LOC_Os10g35810 | 0.4761 | Downregulated | thylakoid lumenal protein, putative, |
| | | | | | expressed |
| | not assigned.unknown | LOC_Os07g37250 | −1.4741 | Upregulated | THYLAKOID FORMATION1, |
| | | | | | chloroplast precursor, putative, |
| | | | | | expressed |
| CHO | major CHO | LOC_Os06g09450 | 0.3504 | Downregulated | sucrose synthase, putative, expressed |
| Metabolism | metabolism.degradation.sucrose. | | | | |
| | Susy | | | | |
| | minor CHO metabolism. | LOC_Os02g07350 | −0.1104 | Upregulated | inositol-1-monophosphatase, putative, |
| | myoinositol.inositol phosphatase | | | | expressed |
| | minor CHO metabolism.others | LOC_Os03g41510 | −0.0057 | Upregulated | oxidoreductase, aldo/keto reductase |
| | | | | | family protein, putative, expressed |
| | minor CHO metabolism.misc | LOC_Os04g41340 | −0.5467 | Upregulated | 4-nitrophenylphosphatase, putative, |
| | | | | | expressed |
| | C1-metabolism | LOC_Os06g40940 | −0.0997 | Upregulated | glycine dehydrogenase, putative, |
| | | | | | expressed |
| | not assigned.unknown | LOC_Os08g27840 | 0.3099 | Downregulated | phosphoenolpyruvate carboxylase, |
| | | | | | putative, expressed |
| | not assigned.unknown | LOC_Os02g02560 | −0.6838 | Upregulated | UTP--glucose-1-phosphate |
| | | | | | uridylyltransferase, putative, expressed |
| | not assigned.unknown | LOC_Os01g60190 | 1.3407 | Downregulated | 2,3-bisphosphoglycerate-independent |
| | | | | | phosphoglycerate mutase, putative, |
| | | | | | expressed |
| Glycolysis | glycolysis.cytosolic | LOC_Os08g03290 | 0.4401 | Downregulated | glyceraldehyde-3-phosphate |
| | branch.glyceraldehyde 3- | | | | dehydrogenase, putative, expressed |
| | phosphate dehydrogenase | | | | |
| | (GAP-DH) | | | | |
| | glycolysis.cytosolic | LOC_Os10g08550 | −0.0465 | Upregulated | enolase, putative, expressed |
| | branch.enolase | | | | |
| | not assigned.unknown | LOC_Os03g50480 | 0.3298 | Downregulated | phosphoglucomutase, putative, |
| | | | | | expressed |
| Fermentation | fermentation.aldehyde | LOC_Os06g15990 | −0.1343 | Upregulated | aldehyde dehydrogenase, putative, |
| | dehydrogenase | | | | expressed |
| Oxidative | OPP.oxidative PP.6- | LOC_Os02g35500 | 0.2040 | Downregulated | NAD binding domain of 6- |
| Pentose | phosphogluconate | | | | phosphogluconate dehydrogenase |
| Phosphate | dehydrogenase | | | | containing protein, expressed |
| Pathway | OPP.non-reductive | LOC_Os01g70170 | 0.7529 | Downregulated | transaldolase, putative, expressed |
| | PP.transaldolase | | | | |
| | OPP.non-reductive PP.ribose | LOC_Os07g08030 | −2.2251 | Upregulated | ribose-5-phosphate isomerase A, |
| | 5-phosphate isomerase | | | | putative, expressed |
| TCA Cycle | TCA/org. | LOC_Os01g22520 | −0.1910 | Upregulated | dihydrolipoyl dehydrogenase 1, |
| | transformation.TCA.pyruvate | | | | mitochondrial precursor, putative, |
| | DH.E3 | | | | expressed |
| | TCA/org. | LOC_Os07g38970 | 1.7102 | Downregulated | succinyl-CoA ligase subunit alpha-2, |
| | transformation.TCA.succinyl- | | | | mitochondrial precursor, putative, |
| | CoA ligase | | | | expressed |
| | TCA/org. | LOC_Os02g40830 | 0.1009 | Downregulated | succinyl-CoA ligase beta-chain, |
| | transformation.TCA.succinyl- | | | | mitochondrial precursor, putative, |
| | CoA ligase | | | | expressed |
| | TCA/org. | LOC_Os05g49880 | 0.6476 | Downregulated | lactate/malate dehydrogenase, putative, |
| | transformation.TCA.malate | | | | expressed |
| | DH | | | | |
| | TCA/org. | LOC_Os10g33800 | 0.2680 | Downregulated | lactate/malate dehydrogenase, putative, |
| | transformation.other organic | | | | expressed |
| | acid transformaitons.cyt MDH | | | | |
| | TCA/org. | LOC_Os08g44810 | −0.1721 | Upregulated | lactate/malate dehydrogenase, putative, |
| | transformation.other organic | | | | expressed |
| | acid transformaitons.cyt MDH | | | | |
| | TCA/org. | LOC_Os01g45274 | −0.2152 | Upregulated | carbonic anhydrase, chloroplast |
| | transformation.carbonic | | | | precursor, putative, expressed |
| | anhydrases | | | | |
| Mitochondrial | mitochondrial electron | LOC_Os05g47980 | −0.2750 | Upregulated | ATP synthase, putative, expressed |
| Electron | transport/ATP synthesis.F1- | | | | |
| Transport | ATPase | | | | |
| Chain | not assigned.unknown | LOC_Os01g72430 | 0.1178 | Downregulated | NADPH quinone oxidoreductase, |
| | | | | | putative, expressed |
| Cell and Cell | cell wall.degradation.mannan- | LOC_Os04g54810 | 1.1963 | Downregulated | beta-D-xylosidase, putative, expressed |
| Wall Related | xylose-arabinose-fucose | | | | |
| Proteins | cell.organisation | LOC_Os09g04790 | −0.4957 | Upregulated | PAP fibrillin family domain containing |
| | | | | | protein, expressed |
| | cell.organisation | LOC_Os01g64630 | 0.1352 | Downregulated | actin, putative, expressed |
| | cell.division | LOC_Os07g38300 | −2.0972 | Upregulated | ribosome recycling factor, putative, |
| | | | | | expressed |
| | cell.cycle.peptidylprolyl | LOC_Os02g02890 | 0.4207 | Downregulated | peptidyl-prolyl cis-trans isomerase, |
| | isomerase | | | | putative, expressed |
| Lipid | lipid metabolism.″exotics″ | LOC_Os01g57570 | 0.2503 | Downregulated | NADPH-dependent FMN reductase |
| Metabolism | (steroids, squalene etc) | | | | domain containing protein, expressed |
| Amino Acid | amino acid | LOC_Os02g55420 | −0.4215 | Upregulated | aminotransferase, classes I and II, |
| Metabolism | metabolism.synthesis.central | | | | domain containing protein, expressed |
| | amino acid | | | | |
| | metabolism.aspartate.aspartate | | | | |
| | aminotransferase | | | | |
| | amino acid | LOC_Os07g01760 | −0.1129 | Upregulated | aminotransferase, classes I and II, |
| | metabolism.synthesis.central | | | | domain containing protein, expressed |
| | amino acid | | | | |
| | metabolism.alanine.alanine | | | | |
| | aminotransferase | | | | |
| | amino acid | LOC_Os08g39300 | −0.0553 | Upregulated | aminotransferase, putative, expressed |
| | metabolism.synthesis.central | | | | |
| | amino acid | | | | |
| | metabolism.alanine.alanine- | | | | |
| | glyoxylate aminotransferase | | | | |
| | amino acid | LOC_Os03g45320 | −0.1042 | Upregulated | dehydrogenase, putative, expressed |
| | metabolism.synthesis.branched | | | | |
| | chain group.leucine specific.3- | | | | |
| | isopropylmalate dehydrogenase | | | | |
| | amino acid | LOC_Os08g39300 | −0.0553 | Upregulated | aminotransferase, putative, expressed |
| | metabolism.synthesis.serine- | | | | |
| | glycine-cysteine | | | | |
| | group.glycine.serine glyoxylate | | | | |
| | aminotransferase | | | | |
| | amino acid | LOC_Os01g74650 | −0.1286 | Upregulated | cysteine synthase, mitochondrial |
| | metabolism.synthesis.serine- | | | | precursor, putative, expressed |
| | glycine-cysteine | | | | |
| | group.cysteine.OASTL | | | | |
| | amino acid | LOC_Os08g09250 | 0.2586 | Downregulated | glyoxalase family protein, putative, |
| | metabolism.degradation.aspartate | | | | expressed |
| | family.threonine | | | | |
| | amino acid | LOC_Os07g09060 | 0.1049 | Downregulated | aldehyde dehydrogenase, putative, |
| | metabolism.degradation. | | | | expressed |
| | branched-chain group.valine | | | | |
| | amino acid | LOC_Os04g53230 | 0.4622 | Downregulated | aminomethyltransferase, putative, |
| | metabolism.degradation.serine- | | | | expressed |
| | glycine-cysteine group.glycine | | | | |
| Secondary | secondary | LOC_Os07g36190 | 0.2424 | Downregulated | hydrolase, NUDIX family, domain |
| Metabolism | metabolism.isoprenoids. | | | | containing protein, expressed |
| | mevalonate pathway.isopentenyl | | | | |
| | pyrophosphate:dimethyllallyl | | | | |
| | pyrophosphate isomerase | | | | |
| | secondary metabolism.sulfur- | LOC_Os03g45320 | −0.1042 | Upregulated | dehydrogenase, putative, expressed |
| | containing.glucosinolates.synthesis. | | | | |
| | aliphatic.methylthioalkylmalate | | | | |
| | dehydrogenase (MAM-D) | | | | |
| Hormones | hormone | LOC_Os01g43090 | −0.9586 | Upregulated | oxidoreductase, aldo/keto reductase |
| | metabolism.auxin.induced- | | | | family protein, putative, expressed |
| | regulated-responsive-activated | | | | |
| | hormone | LOC_Os02g10120 | −0.2903 | Upregulated | lipoxygenase, putative, expressed |
| | metabolism.jasmonate.synthesis- | | | | |
| | degradation.lipoxygenase | | | | |
| Stress - Related | stress.biotic | LOC_Os10g34930 | −1.0021 | Upregulated | secretory protein, putative, expressed |
| Proteins | stress.abiotic.heat | LOC_Os09g30412 | 0.2942 | Downregulated | heat shock protein, putative, expressed |
| | stress.abiotic.heat | LOC_Os02g02410 | −0.1783 | Upregulated | DnaK family protein, putative, |
| | | | | | expressed |
| | stress.abiotic.heat | LOC_Os03g60620 | −0.0838 | Upregulated | DnaK family protein, putative, |
| | | | | | expressed |
| | stress.abiotic.heat | LOC_Os08g38086 | 0.1623 | Downregulated | heat shock protein, putative, expressed |
| | stress.abiotic.heat | LOC_Os04g01740 | 0.4459 | Downregulated | heat shock protein, putative, expressed |
| | stress.abiotic.heat | LOC_Os08g39140 | 0.2173 | Downregulated | heat shock protein, putative, expressed |
| | stress.abiotic.heat | LOC_Os02g53420 | 0.0308 | Downregulated | DnaK family protein, putative, |
| | | | | | expressed |
| | stress.abiotic.heat | LOC_Os11g47760 | 0.4390 | Downregulated | DnaK family protein, putative, |
| | | | | | expressed |
| | stress.abiotic.cold | LOC_Os02g02870 | 0.7089 | Downregulated | glycine-rich protein 2, putative, |
| | | | | | expressed |
| | stress.abiotic.cold | LOC_Os08g03520 | 2.0058 | Downregulated | retrotransposon protein, putative, Ty1- |
| | | | | | copia subclass, expressed |
| | stress.abiotic.unspecified | LOC_Os03g48770 | −1.8332 | Upregulated | Cupin domain containing protein, |
| | | | | | expressed |
| | stress.abiotic.unspecified | LOC_Os08g35760 | 1.5087 | Downregulated | Cupin domain containing protein, |
| | | | | | expressed |
| | not assigned.unknown | LOC_Os05g46480 | 0.9278 | Downregulated | late embryogenesis abundant protein, |
| | | | | | group 3, putative, expressed |
| | not assigned.unknown | LOC_Os11g06720 | 1.6806 | Downregulated | abscisic stress-ripening, putative, |
| | | | | | expressed |
| | not assigned.unknown | LOC_Os11g26750 | 1.2346 | Downregulated | dehydrin, putative, expressed |
| | not assigned.unknown | LOC_Os01g50910 | 0.3139 | Downregulated | late embryogenesis abundant protein, |
| | | | | | group 3, putative, expressed |
| Redox - Related | redox.thioredoxin | LOC_Os11g09280 | 1.0680 | Downregulated | OsPDIL1-1 protein disulfide isomerase |
| Proteins | | | | | PDIL1-1, expressed |
| | redox.thioredoxin | LOC_Os07g29410 | −0.4598 | Upregulated | thioredoxin, putative, expressed |
| | redox.thioredoxin | LOC_Os07g08840 | 1.0021 | Downregulated | thioredoxin, putative, expressed |
| | redox.ascorbate and | LOC_Os05g02530 | −0.4048 | Upregulated | glutathione S-transferase, N-terminal |
| | glutathione.ascorbate | | | | domain containing protein, expressed |
| | redox.ascorbate and | LOC_Os12g07820 | 0.6817 | Downregulated | OsAPx6 - Stromal Ascorbate |
| | glutathione.ascorbate | | | | Peroxidase encoding gene 5,8, |
| | | | | | expressed |
| | redox.ascorbate and | LOC_Os09g39380 | 0.2248 | Downregulated | monodehydroascorbate reductase, |
| | glutathione.ascorbate | | | | putative, expressed |
| Nucleotide | redox.ascorbate and | LOC_Os04g51300 | 0.3539 | Downregulated | peroxidase precursor, putative, |
| Metabolism | glutathione.ascorbate | | | | expressed |
| | redox.ascorbate and | LOC_Os07g49400 | 0.9700 | Downregulated | OsAPx2 - Cytosolic Ascorbate |
| | glutathione.ascorbate | | | | Peroxidase encoding gene 4, 5, 6, 8, |
| | | | | | expressed |
| | redox.ascorbate and | LOC_Os03g17690 | −1.3031 | Upregulated | OsAPx1 - Cytosolic Ascorbate |
| | glutathione.ascorbate | | | | Peroxidase encoding gene 1-8, |
| | | | | | expressed |
| | redox.ascorbate and | LOC_Os03g06740 | −0.8396 | Upregulated | glutathione reductase, putative, |
| | glutathione.glutathione | | | | expressed |
| | redox.ascorbate and | LOC_Os02g56850 | −0.3201 | Upregulated | glutathione reductase, putative, |
| | glutathione.glutathione | | | | expressed |
| | redox.ascorbate and | LOC_Os04g46960 | 0.6462 | Downregulated | glutathione peroxidase domain |
| | glutathione.glutathione | | | | containing protein, expressed |
| | redox.glutaredoxins | LOC_Os08g45140 | 0.1419 | Downregulated | OsGrx_S12 - glutaredoxin subgroup I, |
| | | | | | expressed |
| | redox.peroxiredoxin | LOC_Os06g09610 | −0.4154 | Upregulated | peroxiredoxin, putative, expressed |
| | redox.peroxiredoxin | LOC_Os02g09940 | −0.6841 | Upregulated | peroxiredoxin, putative, expressed |
| | redox.peroxiredoxin.BAS1 | LOC_Os02g33450 | −0.3210 | Upregulated | peroxiredoxin, putative, expressed |
| | redox.dismutases and catalases | LOC_Os05g25850 | 0.2342 | Downregulated | superoxide dismutase, mitochondrial |
| | | | | | precursor, putative, expressed |
| | redox.dismutases and catalases | LOC_Os07g46990 | 0.3759 | Downregulated | copper/zinc superoxide dismutase, |
| | | | | | putative, expressed |
| | redox.dismutases and catalases | LOC_Os08g44770 | −0.0177 | Upregulated | copper/zinc superoxide dismutase, |
| | | | | | putative, expressed |
| | misc.glutathione S transferases | LOC_Os01g55830 | 0.2875 | Downregulated | glutathione S-transferase, putative, |
| | | | | | expressed |
| | misc.glutathione S transferases | LOC_Os10g39740 | 0.1535 | Downregulated | glutathione S-transferase, putative, |
| | | | | | expressed |
| | misc.glutathione S transferases | LOC_Os09g29200 | −2.1616 | Upregulated | glutathione S-transferase, putative, |
| | | | | | expressed |
| | misc.glutathione S transferases | LOC_Os03g04240 | 1.9698 | Downregulated | glutathione S-transferase, putative, |
| | | | | | expressed |
| | misc.glutathione S transferases | LOC_Os10g38700 | −3.4913 | Upregulated | glutathione S-transferase, putative, |
| | | | | | expressed |
| | misc.glutathione S transferases | LOC_Os03g04220 | 1.0953 | Downregulated | glutathione S-transferase, putative, |
| | | | | | expressed |
| | misc.peroxidases | LOC_Os01g22230 | −0.2554 | Upregulated | peroxidase precursor, putative, |
| | | | | | expressed |
| | misc.peroxidases | LOC_Os07g48020 | −0.4086 | Upregulated | peroxidase precursor, putative, |
| | | | | | expressed |
| | nucleotide | LOC_Os05g51700 | −0.3549 | Upregulated | nucleoside diphosphate kinase, |
| | metabolism.phosphotransfer | | | | putative, expressed |
| | and | | | | |
| | pyrophosphatases.nucleoside | | | | |
| | diphosphate kinase | | | | |
| | nucleotide | LOC_Os10g41410 | 0.4579 | Downregulated | nucleoside diphosphate kinase, |
| | metabolism.phosphotransfer | | | | putative, expressed |
| | and | | | | |
| | pyrophosphatases.nucleoside | | | | |
| | diphosphate kinase | | | | |
| | nucleotide | LOC_Os07g30970 | 1.1458 | Downregulated | nucleoside diphosphate kinase, |
| | metabolism.phosphotransfer | | | | putative, expressed |
| | and | | | | |
| | pyrophosphatases.nucleoside | | | | |
| | diphosphate kinase | | | | |
| | nucleotide | LOC_Os02g52940 | 0.9380 | Downregulated | soluble inorganic pyrophosphatase, |
| | metabolism.phosphotransfer | | | | putative, expressed |
| | and pyrophosphatases.misc | | | | |
| | DNA.synthesis/chromatin | LOC_Os10g32348 | −0.0669 | Upregulated | PsbP, putative, expressed |
| | structure | | | | |
| | not assigned.unknown | LOC_Os01g23680 | −0.0259 | Upregulated | rossmann fold nucleotide-binding |
| | | | | | protein involved in DNA uptake, |
| | | | | | putative, expressed |
| Miscellaneous | Biodegradation of Xenobiotics | LOC_Os08g09250 | 0.2586 | Downregulated | glyoxalase family protein, putative, |
| Enzymes | | | | | expressed |
| | Biodegradation of Xenobiotics | LOC_Os09g28630 | −0.4135 | Upregulated | gibberellin receptor, putative, |
| | | | | | expressed |
| | Biodegradation of | LOC_Os02g17920 | −0.0099 | Upregulated | glyoxalase family protein, putative, |
| | Xenobiotics.lactoylglutathione | | | | expressed |
| | lyase | | | | |
| | misc.misc2 | LOC_Os01g34700 | −1.5970 | Upregulated | dienelactone hydrolase family protein, |
| | | | | | expressed |
| | misc.oxidases - copper, flavone | LOC_Os08g29170 | −1.0250 | Upregulated | dehydrogenase, putative, expressed |
| | etc. | | | | |
| | misc.alcohol dehydrogenases | LOC_Os08g43190 | −0.1080 | Upregulated | dehydrogenase, putative, expressed |
| RNA | RNA.processing.ribonucleases | LOC_Os07g33240 | 0.0570 | Downregulated | endoribonuclease, putative, expressed |
| Processing | | | | | NAD dependent |
| | RNA.regulation of | LOC_Os07g11110 | −1.2597 | Upregulated | epimerase/dehydratase family protein, |
| | transcription.unclassified | | | | putative, expressed |
| | RNA.regulation of | LOC_Os04g31700 | −0.0375 | Upregulated | methylisocitrate lyase 2, putative, |
| | transcription.unclassified | | | | expressed |
| | RNA.RNA binding | LOC_Os09g10760 | 0.5613 | Downregulated | RNA recognition motif containing |
| | | | | | protein, putative, expressed |
| | RNA.RNA binding | LOC_Os07g43810 | 1.6657 | Downregulated | RNA recognition motif containing |
| | | | | | protein, putative, expressed |
| | RNA.RNA binding | LOC_Os09g39180 | 0.3136 | Downregulated | RNA recognition motif containing |
| | | | | | protein, putative, expressed |
| Protein | N-metabolism.ammonia | LOC_Os07g46460 | −0.9547 | Upregulated | ferredoxin-dependent glutamate |
| Metabolism, | metabolism.glutamate synthase | | | | synthase, chloroplast precursor, |
| Synthesis and | | | | | putative, expressed |
| Degradation | N-metabolism.ammonia | LOC_Os02g50240 | 0.5269 | Downregulated | glutamine synthetase, catalytic domain |
| | metabolism.glutamine synthase | | | | containing protein, expressed |
| | N-metabolism.ammonia | LOC_Os04g56400 | −0.2369 | Upregulated | glutamine synthetase, catalytic domain |
| | metabolism.glutamine synthase | | | | containing protein, expressed |
| | protein.synthesis.ribosomal | LOC_Os03g62630 | −0.9647 | Upregulated | ribosomal protein S6, putative, |
| | protein.prokaryotic.chloroplast. | | | | expressed |
| | 30S subunit.S6 | | | | |
| | protein.synthesis.ribosomal | LOC_Os01g47330 | −2.3320 | Upregulated | ribosomal protein L7/L12 C-terminal |
| | protein.prokaryotic.chloroplast. | | | | domain containing protein, expressed |
| | 50S subunit.L12 | | | | |
| | protein.synthesis.ribosomal | LOC_Os01g54540 | 0.3782 | Downregulated | ribosomal protein L13, putative, |
| | protein.prokaryotic.chloroplast. | | | | expressed |
| | 50S subunit.L13 | | | | |
| | protein.synthesis.ribosomal | LOC_Os01g57956 | −0.8244 | Upregulated | chloroplast 50S ribosomal protein L14, |
| | protein.prokaryotic.chloroplast. | | | | putative, expressed |
| | 50S subunit.L14 | | | | |
| | protein.synthesis.ribosomal | LOC_Os04g16828 | −0.8244 | Upregulated | chloroplast 50S ribosomal protein L14, |
| | protein.prokaryotic.chloroplast. | | | | putative, expressed |
| | 50S subunit.L14 | | | | |
| | protein.synthesis.ribosomal | LOC_Os10g21342 | −0.8244 | Upregulated | chloroplast 50S ribosomal protein L14, |
| | protein.prokaryotic.chloroplast. | | | | putative, expressed |
| | 50S subunit.L14 | | | | |
| | protein.synthesis.ribosomal | LOC_Os08g15276 | −0.8244 | Upregulated | chloroplast 50S ribosomal protein L14, |
| | protein.prokaryotic.chloroplast. | | | | putative, expressed |
| | 50S subunit.L14 | | | | |
| | protein.synthesis.ribosomal | LOC_Os05g22722 | −0.8244 | Upregulated | chloroplast 50S ribosomal protein L14, |
| | protein.prokaryotic.chloroplast. | | | | putative, expressed |
| | 50S subunit.L14 | | | | |
| | protein.synthesis.ribosomal | LOC_Os02g06700 | 1.3440 | Downregulated | ribosomal protein, putative, expressed |
| | protein.eukaryotic.40S | | | | |
| | subunit.S14 | | | | |
| | protein.synthesis.elongation | LOC_Os02g38210 | 0.4323 | Downregulated | elongation factor Tu, putative, |
| | | | | | expressed |
| | protein.postranslational | LOC_Os04g40600 | 0.1861 | Downregulated | peptide methionine sulfoxide |
| | modification | | | | reductase, putative, expressed |
| | protein.postranslational | LOC_Os10g41400 | −0.8327 | Upregulated | peptide methionine sulfoxide |
| | modification | | | | reductase, putative, expressed |
| | protein.degradation | LOC_Os03g60740 | 0.6427 | Downregulated | expressed protein |
| | protein.degradation | LOC_Os02g58340 | 0.1390 | Downregulated | oligopeptidase, putative, expressed |
| | protein.degradation | LOC_Os08g44860 | −0.3903 | Upregulated | aminopeptidase, putative, expressed |
| | protein.degradation | LOC_Os02g55140 | 0.0521 | Downregulated | leucine aminopeptide, chloroplast |
| | | | | | precursor, putative, expressed |
| | protein.degradation.cysteine | LOC_Os04g55650 | 0.0631 | Downregulated | oryzain alpha chain precursor, |
| | protease | | | | putative, expressed |
| | protein.degradation.serine | LOC_Os04g32560 | 0.1069 | Downregulated | ATP-dependent Clp protease ATP- |
| | protease | | | | binding subunit clpA homolog |
| | | | | | CD4B, chloroplast precursor, putative, |
| | | | | | expressed |
| | protein.degradation.serine | LOC_Os02g42290 | −0.3302 | Upregulated | OsClp3 - Putative Clp protease |
| | protease | | | | homologue, expressed |
| | protein.degradation.ubiquitin. | LOC_Os05g09490 | −2.0062 | Upregulated | peptidase, T1 family, putative, |
| | proteasom | | | | expressed |
| | protein.degradation.ubiquitin. | LOC_Os06g06030 | −0.0115 | Upregulated | peptidase, T1 family, putative, |
| | proteasom | | | | expressed |
| | protein.degradation.ubiquitin. | LOC_Os02g04100 | 0.1947 | Downregulated | peptidase, T1 family, putative, |
| | proteasom | | | | expressed |
| | protein.degradation.ubiquitin. | LOC_Os08g43540 | 0.1595 | Downregulated | peptidase, T1 family, putative, |
| | proteasom | | | | expressed |
| | protein.folding | LOC_Os09g26730 | −1.9708 | Upregulated | chaperonin, putative, expressed |
| | protein.folding | LOC_Os03g64210 | 0.2617 | Downregulated | T-complex protein, putative, expressed |
| | protein.folding | LOC_Os06g02380 | 0.2695 | Downregulated | T-complex protein, putative, expressed |
| | | | | | peptidyl-prolyl cis-trans isomerase, |
| | protein.folding | LOC_Os06g45340 | −1.5229 | Upregulated | FKBP-type, putative, expressed |
| | protein.folding | LOC_Os02g39870 | −1.3684 | Upregulated | co-chaperone GrpE protein, putative, |
| | | | | | expressed |
| | protein.folding | LOC_Os07g44740 | −0.2338 | Upregulated | chaperonin, putative, expressed |
| | protein.folding | LOC_Os06g09688 | −1.4489 | Upregulated | chaperonin, putative, expressed |
| | protein.folding | LOC_Os10g32550 | 1.2254 | Downregulated | T-complex protein, putative, expressed |
| | protein.folding | LOC_Os10g41710 | −0.4063 | Upregulated | chaperonin, putative, expressed |
| | not assigned.unknown | LOC_Os05g32820 | 0.5295 | Downregulated | peptide-N4-asparagine amidase A, |
| | | | | | putative, expressed |
| Signaling | signalling.receptor | LOC_Os06g41560 | 0.1266 | Downregulated | receptor-like protein kinase, putative, |
| Proteins | kinases misc | | | | expressed |
| | signalling.calcium | LOC_Os03g29770 | −0.2462 | Upregulated | EF hand family protein, expressed |
| | signalling.14-3-3 proteins | LOC_Os08g33370 | 0.7724 | Downregulated | 14-3-3 protein, putative, expressed |
| | signalling.14-3-3 proteins | LOC_Os08g37490 | 0.4033 | Downregulated | 14-3-3 protein, putative, expressed |
| | signalling.14-3-3 proteins | LOC_Os03g50290 | 0.5988 | Downregulated | 14-3-3 protein, putative, expressed |
| | signalling.14-3-3 proteins | LOC_Os02g36974 | 0.1494 | Downregulated | 14-3-3 protein, putative, expressed |
| Development - | development.storage proteins | LOC_Os05g02520 | 0.4121 | Downregulated | cupin domain containing protein, |
| Related | | | | | expressed |
| Proteins | development.unspecified | LOC_Os04g57590 | −0.7016 | Upregulated | DJ-1 family protein, putative, |
| | | | | | expressed |
| Transport | transport.calcium | LOC_Os03g63420 | −0.4632 | Upregulated | OsGrx_S14 - glutaredoxin subgroup II, |
| | | | | | expressed |
| Unassigned | gluconeogenesis.Malate DH | LOC_Os03g56280 | −0.9337 | Upregulated | lactate/malate dehydrogenase, putative, |
| Classes | | | | | expressed |
| | metal handling | LOC_Os01g68770 | 0.9296 | Downregulated | selenium-binding protein, putative, |
| | | | | | expressed |
| | Co-factor and vitamine | LOC_Os10g01080 | −0.4295 | Upregulated | SOR/SNZ family protein, putative, |
| | metabolism | | | | expressed |
| | Co-factor and vitamine | LOC_Os07g34570 | 0.0057 | Downregulated | FAD dependent oxidoreductase |
| | metabolism.thiamine | | | | domain containing protein, expressed |
| | not assigned.unknown | LOC_Os03g60509 | 1.0562 | Downregulated | expressed protein |
| | not assigned.unknown | LOC_Os06g51330 | −0.8727 | Upregulated | expressed protein |

[0299] During stress, an increased content and up-regulation of an aldehyde dehydrogenase (methyl malonate-semialdehyde dehydrogenase, MMSDH) in the roots of the 481-B was observed compared to the parents (FIGS. 23, 29L). Aldehydes are intermediates in several fundamental metabolism pathways such as those involved with amino acid and carbohydrates. They are produced in response to environmental stress. Aldehyde dehydrogenases catalyze the irreversible oxidation of reactive aldehydes to their corresponding carboxylic acids and also act as efficient scavengers of reactive oxygen species (Perozich et al., 1999; Kirch et al., 2005). MMSDH specifically catalyzes the irreversible oxidative decarboxylation of malonate-semialdehydes and methylmalonate semialdehydes to acetyl-CoA which leads to more energy generation through TCA cycle (Oguchi et al., 2004). They play an important role in detoxifying the aldehydes as well as for energy generation in the roots of the NILs and thus help in maintaining better homeostasis required for better plant sustenance.

[0300] Protein and Metabolite Factors Involved in Drought-Induced Nitrogen Content Variations.

[0301] During drought stress, nitrogen (N) balance is of high importance to the plant. In rice under drought, growth and sustenance was better in the plants with N supply than in those without (Suralta, 2010). Increased lateral roots in the 481-B make for increased capacity to extract nutrients from the soil. N content under drought was more in the roots of the 481-B (FIG. 29E). Use of N by plants involves the processes of N uptake, assimilation, translocation and remobilization, wherein amino acids play a crucial role. Free amino acid content in the roots of the 481-B was more compared to the parents (FIGS. 29G-29J), showing that plants with more lateral roots were be the ones with better N status under drought. Proteome analysis also showed this. Aminotransferases, which are involved in N utilization through several amino acids (Robredo et al., 2011; Forde and Lea, 2007), were more abundant in the 481-B roots than in Vandana roots (FIG. 23). Glutamate synthetase was also more in the 481-B roots (FIG. 23) indicating increased glutamate amounts, which was observed to be in larger amounts in the 481-B than in Vandana 1 (FIGS. 29G-29J). Glutamate is one of the transportable amino acids, as well as a precursor for the synthesis of other amino acids such as arginine and proline (Ramanjulu et al., 1997).

[0302] Protein and Metabolite Factors for Better Plant Sustenance Under Drought.

[0303] Sugars and starch form the major reactants and products of carbohydrate metabolism, which is adjusted in response to environmental and developmental cues. Soluble sugars accumulate under stress and function as metabolic resources, structural constituents and signaling molecules in processes associated with plant growth and development (Jang & Sheen, 1997; Tran et al., 2007; Ho et al., 2001). Majority of the CO2 assimilated is converted into sucrose (Koch, 2004), which is the primary mobile sugar in the phloem translocated to the grains (Liu et al., 2012).

[0304] Sucrose has a role in stabilizing the membranes and proteins under water deficit (Gupta & Kaur, 2005). In the flag leaf of 481-B, a slight increase in the sucrose content was observed under stress compared to the control condition (FIG. 30C). However sucrose synthase was seen to be down-regulated in the 481-B compared to Vandana (FIG. 25). Down-regulation of sucrose synthase was an indication of feedback inhibition due to higher content of sucrose in the flag leaf. Higher accumulation of sucrose in the flag leaf of the 481-B perhaps indicated a better mechanism to be operative in the 481-B to maintain sufficient amounts of sucrose during stress as compared to the control conditions which can then be made available for remobilization to the spikelets during grain filling for starch synthesis. This was corroborated by increased sucrose and starch content in the 481-B spikelets under drought as compared to Vandana (FIGS. 31C-31D). As opposed to significant changes in the sucrose content in Vandana and WayRarem flag leaf under stress, the 481-B flag leaf exhibited limited change in sucrose content, which was also true for its starch content, while starch content in Vandana flag leaf and spikelets changed significantly under stress (FIGS. 30C, 31C-31D).

[0305] Under drought, photosynthesis is down-regulated to conserve energy and water (Pinheiro et al., 2011) and cell growth is adversely affected (Chaves et al., 2009). Sucrose and glucose are used in respiration to meet cellular energy needs. They are also substrates for osmolyte synthesis towards maintaining homeostasis by protecting membranes, enzymes and other structures against damage and denaturation (Gupta & Kaur, 2005). Fructose however can be involved in secondary metabolite synthesis, such as erythrose-1 4-P, which is a substrate for lignin and phenolic compounds synthesis (Hilal et al., 2004). In the case of the 481-B however, the reason for decreased photosynthesis is related to the sugars. For example, glucose and fructose increased under stress in the flag leaves of Vandana and 481-B but the combined amount of the three sugars (sucrose, glucose and fructose) was more in the flag leaf of the 481-B than in Vandana (FIGS. 30A-30C). Higher sugar content and decreased starch synthesis lead to feedback inhibition of photosynthesis (Paul and Foyer, 2001). Proteomics data indicated lower abundance, in the 481-B under drought, for proteins such as the PsbP and oxygen-evolving enhancer protein involved in the light-dependent photosystem reactions (Table 5). This indicates repression of CO+ fixation. Indeed, a similar photosynthetic rate was observed between 481-B and Vandana under normal conditions changed to a lower photosynthetic rate for 481-B than Vandana under drought (Table 5). However, stomatal closure during drought also prevents CO2 fixation while it is necessary to prevent transpirational water loss. Transpiration efficiency of the 481-B was higher than Vandana under drought (FIG. 40) because the stomatal conductance in the 481-B was substantially reduced under drought (FIG. 41). Calvin cycle enzymes involved in the regeneration of RuBP (Ribulose-1, 5-bisphosphate) such as triose phosphate isomerase, fructose bis-phospate aldolase, fructose-1,6-bisphosphatase and transketolase were more abundant in the 481-B (FIG. 28). Regeneration of RuBP produces CO₂ and NADPH. CO₂ is also limited by partial stomatal closure, while NADPH can feed into various biosynthetic reactions and help in redox buffering in the cell (Verslues and Sharma, 2000). Enzymes involved in the photorespiratory pathway, particularly glycolate oxidase, glycine dehydrogenase and serine hydroxymethyltransferase, were more abundant in the flag leaf of the 481-B (FIG. 26). The photorespiratory pathway aids in reducing O₂ that is involved in reactive oxygen species (ROS) generation. Yet, an inevitable consequence of drought stress is the production of ROS, which causes oxidative damage to the plant (de Carvalho, 2008). Increased amounts of antioxidant enzymes were observed in all three tissues of the 481-B, particularly ascorbate peroxidase and glutathione peroxidase (FIG. 27). These two enzymes are important in detoxification of H2O2 produced during stress (Zhang et al., 2012). Glutathione peroxidase in particular is important in scavenging ROS produced from photosynthesis (Milla et al., 2003). Differential expression of other redox proteins such as glutathione reductase, peroxiredoxin, superoxide dismutase and thioredoxins (Table 5) support the ROS detoxification and signaling processes to maintain cellular homeostasis. Thus, through subtle and coordinated changes in the photosynthetic rate, stomatal conductance, photorespiration and redox status coupled with the regeneration of RuBP, the 481-B exhibits a strategy for better plant sustenance under drought.

TABLE 6
The complete set of proteins identified in the spikelets of Vandana and the 481B NIL (in triplicates),
represented as fold increase in the 481B NIL compared to Vandana during drought stress.

| | | | Log 2 | | |
|---|---|---|---|---|---|
| Gene Ontology | MapMan Bin Description | Locus Id's | Ratio | | MSU v7.0 description |
| Photosystems | PS.lightreaction.photosystem II.PSII | LOC_Os07g36080 | 1.5637 | Downregulated | oxygen evolving enhancer |
| | polypeptide subunits | | | | protein 3 domain containing |
| | | | | | protein, expressed |
| | PS.lightreaction.photo system II.PSII | LOC_Os07g04840 | −0.0722 | Upregulated | PsbP, putative, expressed |
| | polypeptide subunits | | | | |
| | PS.lightreaction.photo system ILPSII | LOC_Os01g31690 | −0.2842 | Upregulated | oxygen-evolving enhancer |
| | polypeptide subunits | | | | protein 1, chloroplast precursor, |
| | | | | | putative, expressed |
| e-Carriers | PS.lightreaction.other electron carrier | LOC_Os06g01210 | 1.9030 | Downregulated | plastocyanin, chloroplast |
| | (ox/red).plastocyanin | | | | precursor, putative, expressed |
| | PS.lightreaction.other electron carrier | LOC_Os08g01380 | −1.3163 | Upregulated | 2Fe-2S iron-sulfur cluster |
| | (ox/red).ferredoxin | | | | binding domain containing |
| | | | | | protein, expressed |
| | PS.lightreaction.other electron carrier | LOC_Os02g01340 | −0.2630 | Upregulated | ferredoxin--NADP reductase, |
| | (ox/red).ferredoxin reductase | | | | chloroplast precursor, putative, |
| | | | | | expressed |
| | PS.lightreaction.other electron carrier | LOC_Os02g22260 | 0.0712 | Downregulated | fruit protein PKIWI502, |
| | (ox/red).ferredoxin oxireductase | | | | putative, expressed |
| Photorespiration | PS.photorespiration.glycolate oxydase | LOC_Os07g05820 | −0.2168 | Upregulated | hydroxyacid oxidase 1, |
| | | | | | putative, expressed |
| | PS.photorespiration.aminotransferases | LOC_Os08g39300 | −0.1161 | Upregulated | aminotransferase, putative, |
| | peroxisomal | | | | expressed |
| | PS.photorespiration.glycine cleavage.H | LOC_Os10g37180 | 0.6189 | Downregulated | glycine cleavage system H |
| | protein | | | | protein, putative, expressed |
| | PS.photorespiration.serine | LOC_Os03g52840 | −0.9404 | Upregulated | serine |
| | hydroxymethyltransferase | | | | hydroxymethyltransferase, |
| | | | | | mitochondrial precursor, |
| | | | | | putative, expressed |
| | PS.photorespiration.hydroxypyruvate | LOC_Os02g01150 | −0.3109 | Upregulated | erythronate-4-phosphate |
| | reductase | | | | dehydrogenase domain |
| | | | | | containing protein, expressed |
| Calvin Cycle | PS.calvin cycle.phosphoglycerate kinase | LOC_Os06g45710 | −0.2390 | Upregulated | phosphoglycerate kinase |
| | | | | | protein, putative, expressed |
| | PS.calvin cycle.phosphoglycerate kinase | LOC_Os05g41640 | 2.0834 | Downregulated | phosphoglycerate kinase |
| | | | | | protein, putative, expressed |
| | PS.calvin cycle.phosphoglycerate kinase | LOC_Os02g07260 | −0.7764 | Upregulated | phosphoglycerate kinase |
| | | | | | protein, putative, expressed |
| | PS.calvin cycle.GAP | LOC_Os03g03720 | 0.4913 | Downregulated | glyceraldehyde-3-phosphate |
| | | | | | dehydrogenase, putative, |
| | | | | | expressed |
| | PS.calvin cycle.GAP | LOC_Os04g38600 | 0.3847 | Downregulated | glyceraldehyde-3-phosphate |
| | | | | | dehydrogenase, putative, |
| | | | | | expressed |
| | PS.calvin cycle.TPI | LOC_Os01g62420 | −1.7069 | Upregulated | triosephosphate isomerase, |
| | | | | | cytosolic, putative, expressed |
| | PS.calvin cycle.TPI | LOC_Os01g05490 | −0.2935 | Upregulated | triosephosphate isomerase, |
| | | | | | cytosolic, putative, expressed |
| | PS.calvin cycle.TPI | LOC_Os09g36450 | 0.1339 | Downregulated | triosephosphate isomerase, |
| | | | | | chloroplast precursor, putative, |
| | | | | | expressed |
| | PS.calvin cycle.aldolase | LOC_Os11g07020 | 0.0211 | Downregulated | fructose-bisphospate aldolase |
| | | | | | isozyme, putative, expressed |
| | PS.calvin cycle.aldolase | LOC_Os01g67860 | −0.4051 | Upregulated | fructose-bisphospate aldolase |
| | | | | | isozyme, putative, expressed |
| | PS.calvin cycle.aldolase | LOC_Os05g33380 | −0.7749 | Upregulated | fructose-bisphospate aldolase |
| | | | | | isozyme, putative, expressed |
| | PS.calvin cycle.aldolase | LOC_Os06g40640 | −0.2202 | Upregulated | fructose-bisphospate aldolase |
| | | | | | isozyme, putative, expressed |
| | PS.calvin cycle.transketolase | LOC_Os06g04270 | 0.4282 | Downregulated | transketolase, chloroplast |
| | | | | | precursor, putative, expressed |
| | PS.calvin cycle.seduheptulose | LOC_Os04g16680 | −0.0726 | Upregulated | fructose-1,6-bisphosphatase, |
| | bisphosphatase | | | | putative, expressed |
| | PS.calvin cycle.PRK | LOC_Os02g47020 | −0.3656 | Upregulated | phosphoribulokinase/Uridine |
| | | | | | kinase family protein, |
| | | | | | expressed |
| | PS.calvin cycle.rubisco interacting | LOC_Os11g47970 | 1.0692 | Downregulated | AAA-type ATPase family |
| | | | | | protein, putative, expressed |
| Thylakoid | not assigned.unknown | LOC_Os01g05080 | 0.1848 | Downregulated | thylakoid lumenal protein, |
| Proteins | | | | | putative, expressed |
| CHO | major CHO | LOC_Os08g25734 | −0.6910 | Upregulated | glucose-1-phosphate |
| Metabolism | metabolism.synthesis.starch.AGPase | | | | adenylyltransferase large |
| | | | | | subunit, chloroplast precursor, |
| | | | | | putative, expressed |
| | | | | | glucose-1-phosphate |
| | major CHO | LOC_Os01g44220 | −3.0200 | Upregulated | adenylyltransferase large |
| | metabolism.synthesis.starch.AGPase | | | | subunit, chloroplast precursor, |
| | | | | | putative, expressed |
| | major CHO | LOC_Os02g32660 | −0.8422 | Upregulated | 1,4-alpha-glucan-branching |
| | metabolism.synthesis.starch.starch | | | | enzyme, chloroplast precursor, |
| | branching | | | | putative, expressed |
| | major CHO | LOC_Os06g51084 | −0.9212 | Upregulated | 1,4-alpha-glucan-branching |
| | metabolism.synthesis.starch.starch | | | | enzyme, chloroplast precursor, |
| | branching | | | | putative, expressed |
| | major CHO | LOC_Os01g66940 | 0.0320 | Downregulated | kinase, pfkB family, putative, |
| | metabolism.degradation.sucrose. | | | | expressed |
| | fructokinase | | | | |
| | major CHO | LOC_Os08g02120 | −0.2550 | Upregulated | kinase, pfkB family, putative, |
| | metabolism.degradation.sucrose. | | | | expressed |
| | fructokinase | | | | |
| | major CHO | LOC_Os07g42490 | −2.5355 | Upregulated | sucrose synthase, putative, |
| | metabolism.degradation.sucrose.Susy | | | | expressed |
| | major CHO | LOC_Os06g09450 | −0.1459 | Upregulated | sucrose synthase, putative, |
| | metabolism.degradation.sucrose.Susy | | | | expressed |
| | major CHO | LOC_Os03g55090 | −1.6316 | Upregulated | alpha-glucan phosphorylast |
| | metabolism.degradation.starch.starch | | | | isozyme, putative, expressed |
| | phosphorylase | | | | |
| | C1-metabolism | LOC_Os06g29180 | −0.5043 | Upregulated | erythronate-4-phosphate |
| | | | | | dehydrogenase domain |
| | | | | | containing protein, expressed |
| | not assigned.unknown | LOC_Os08g27840 | 0.8034 | Downregulated | phosphoenolpyruvate |
| | | | | | carboxylase, putative, |
| | | | | | expressed |
| | not assigned.unknown | LOC_Os02g02560 | −0.7203 | Upregulated | UTP--glucose-1-phosphate |
| | | | | | uridylyltransferase, putative, |
| | | | | | expressed |
| | not assigned.unknown | LOC_Os07g47290 | 1.0816 | Downregulated | xylose isomerase, putative, |
| | | | | | expressed |
| | not assigned.unknown | LOC_Os01g60190 | −0.0957 | Upregulated | 2,3-bisphosphoglycerate- |
| | | | | | independent phosphoglycerate |
| | | | | | mutase, putative, expressed |
| | not assigned.unknown | LOC_Os02g14770 | 0.4843 | Downregulated | phosphoenolpyruvate |
| | | | | | carboxylase, putative, |
| | | | | | expressed |
| Glycolysis | glycolysis.cytosolic | LOC_Os08g03290 | 0.4948 | Downregulated | glyceraldehyde-3-phosphate |
| | branch.glyceraldehyde 3-phosphate | | | | dehydrogenase, putative, |
| | dehydrogenase (GAP-DH) | | | | expressed |
| | glycolysis.cytosolic | LOC_Os02g38920 | −0.6286 | Upregulated | glyceraldehyde-3-phosphate |
| | branch.glyceraldehyde 3-phosphate | | | | dehydrogenase, putative, |
| | dehydrogenase (GAP-DH) | | | | expressed |
| | glycolysis.cytosolic branch.enolase | LOC_Os06g04510 | 1.2905 | Downregulated | enolase, putative, expressed |
| | glycolysis.cytosolic branch.enolase | LOC_Os10g08550 | 0.2115 | Downregulated | enolase, putative, expressed |
| | glycolysis.plastid branch.glucose-6- | LOC_Os03g56460 | 1.0098 | Downregulated | glucose-6-phosphate isomerase, |
| | phosphate isomerase | | | | putative, expressed |
| | not assigned.unknown | LOC_Os03g50480 | −0.1673 | Upregulated | phosphoglucomutase, putative, |
| | | | | | expressed |
| Fermentation | fermentation.aldehyde dehydrogenase | LOC_Os08g32870 | 0.9221 | Downregulated | aldehyde dehydrogenase, |
| | | | | | putative, expressed |
| | fermentation.aldehyde dehydrogenase | LOC_Os06g15990 | 0.0983 | Downregulated | aldehyde dehydrogenase, |
| | | | | | putative, expressed |
| Oxidative | OPP.oxidative PP.6-phosphogluconate | LOC_Os06g02144 | 1.0788 | Downregulated | 6-phosphogluconate |
| Pentose | dehydrogenase | | | | dehydrogenase, |
| Phosphate | | | | | decarboxylating, putative, |
| Pathway | | | | | expressed |
| | OPP.non-reductive PP.transaldolase | LOC_Os01g70170 | −0.2570 | Upregulated | transaldolase, putative, |
| | | | | | expressed |
| | OPP.non-reductive PP.ribose 5- | LOC_Os07g08030 | −0.1695 | Upregulated | ribose-5-phosphate isomerase |
| | phosphate isomerase | | | | A, putative, expressed |
| TCA Cycle | TCA/org. transformation.TCA.pyruvate | LOC_Os01g22520 | 0.9039 | Downregulated | dihydrolipoyl dehydrogenase 1, |
| | DH.E3 | | | | mitochondrial precursor, |
| | | | | | putative, expressed |
| | TCA/org. transformation.TCA.CS | LOC_Os02g10070 | 0.8903 | Downregulated | citrate synthase, putative, |
| | | | | | expressed |
| | TCA/org. transformation.TCA.aconitase | LOC_Os08g09200 | 0.4164 | Downregulated | aconitate hydratase protein, |
| | | | | | putative, expressed |
| | TCA/org. transformation.TCA.IDH | LOC_Os01g46610 | 1.0543 | Downregulated | dehydrogenase, putative, |
| | | | | | expressed |
| | TCA/org. transformation.TCA.2- | LOC_Os04g32330 | 0.0882 | Downregulated | dihydrolipoyllysine-residue |
| | oxoglutarate dehydrogenase | | | | succinyltransferase component |
| | | | | | of 2-oxoglutarate |
| | | | | | dehydrogenase complex, |
| | | | | | mitochondrial precursor, |
| | | | | | putative, expressed |
| | | | | | succinyl-CoA ligase subunit |
| | TCA/org. transformation.TCA.succinyl- | LOC_Os07g38970 | −0.2509 | Upregulated | alpha-2, mitochondrial |
| | CoA ligase | | | | precursor, putative, expressed |
| | TCA/org. transformation.TCA.succinyl- | LOC_Os02g40830 | 0.0864 | Downregulated | succinyl-CoA ligase beta-chain, |
| | CoA ligase | | | | mitochondrial precursor, |
| | | | | | putative, expressed |
| | TCA/org. transformation.TCA.malate | LOC_Os05g49880 | −0.2718 | Upregulated | lactate/malate dehydrogenase, |
| | DH | | | | putative, expressed |
| | TCA/org. transformation.other organic | LOC_Os10g33800 | −1.0246 | Upregulated | lactate/malate dehydrogenase, |
| | acid transformaitons.cyt MDH | | | | putative, expressed |
| | TCA/org. transformation.other organic | LOC_Os08g44810 | −0.4044 | Upregulated | lactate/malate dehydrogenase, |
| | acid transformaitons.cyt MDH | | | | putative, expressed |
| | TCA/org. transformation.other organic | LOC_Os01g52500 | 0.6078 | Downregulated | NADP-dependent malic |
| | acid transformaitons.malic | | | | enzyme, putative, expressed |
| | TCA/org. transformation.carbonic | LOC_Os01g45274 | 0.4191 | Downregulated | carbonic anhydrase, chloroplast |
| | anhydrases | | | | precursor, putative, expressed |
| Mitochondrial | mitochondrial electron transport/ATP | LOC_Os05g47980 | −0.4295 | Upregulated | ATP synthase, putative, |
| Electron | synthesis.F1-ATPase | | | | expressed |
| Transport Chain | | | | | |
| Cell and Cell | cell wall.cell wall proteins.RGP | LOC_Os03g40270 | −0.1231 | Upregulated | alpha-1,4-glucan-protein |
| Wall Related | | | | | synthase, putative, expressed |
| Proteins | cell wall.modification | LOC_Os03g01610 | 2.3651 | Downregulated | expansin precursor, putative, |
| | | | | | expressed |
| | cell wall.modification | LOC_Os06g45150 | 2.2180 | Downregulated | pollen allergen putative, |
| | | | | | expressed |
| | cell wall. modification | LOC_Os06g44470 | 2.9553 | Downregulated | pollen allergen putative, |
| | | | | | expressed |
| | cell wall.modification | LOC_Os03g01650 | 2.3651 | Downregulated | expansin precursor, putative, |
| | | | | | expressed |
| | cell.organisation | LOC_Os03g50885 | −0.2047 | Upregulated | actin, putative, expressed |
| | cell.organisation | LOC_Os02g51750 | 0.1693 | Downregulated | annexin, putative, expressed |
| | cell.organisation | LOC_Os06g05880 | 0.2065 | Downregulated | profilin domain containing |
| | | | | | protein, expressed |
| | cell.organisation | LOC_Os07g38730 | −1.3460 | Upregulated | tubulin/FtsZ domain containing |
| | | | | | protein, putative, expressed |
| | cell.organisation | LOC_Os10g17680 | 3.0523 | Downregulated | profilin domain containing |
| | | | | | protein, expressed |
| | cell.organisation | LOC_Os10g17660 | 3.0523 | Downregulated | profilin domain containing |
| | | | | | protein, expressed |
| | cell.organisation | LOC_Os03g60580 | 0.4426 | Downregulated | actin-depolymerizing factor, |
| | | | | | putative, expressed |
| | cell.organisation | LOC_Os03g61970 | −0.0750 | Upregulated | actin, putative, expressed |
| | cell.organisation | LOC_Os11g14220 | 0.3604 | Downregulated | tubulin/FtsZ domain containing |
| | | | | | protein, putative, expressed |
| | cell.division | LOC_Os04g35570 | 0.6979 | Downregulated | Regulator of chromosome |
| | | | | | condensation domain |
| | | | | | containing protein, expressed |
| | cell.cycle.peptidylprolyl isomerase | LOC_Os02g02890 | −0.0097 | Upregulated | peptidyl-prolyl cis-trans |
| | | | | | isomerase, putative, expressed |
| | cell.cycle.peptidylprolyl isomerase | LOC_Os05g01270 | 0.5344 | Downregulated | peptidyl-prolyl cis-trans |
| | | | | | isomerase, putative, expressed |
| | cell.cycle.peptidylprolyl isomerase | LOC_Os08g41390 | −0.0005 | Upregulated | peptidyl-prolyl isomerase, |
| | | | | | putative, expressed |
| | cell.cycle.peptidylprolyl isomerase | LOC_Os09g39780 | 0.1088 | Downregulated | peptidyl-prolyl cis-trans |
| | | | | | isomerase, putative, expressed |
| | not assigned.unknown | LOC_Os08g04650 | 2.8489 | Downregulated | pectinesterase inhibitor domain |
| | | | | | containing protein, expressed |
| Lipid | lipid metabolism.FA synthesis and FA | LOC_Os09g10600 | −0.5556 | Upregulated | enoyl-acyl-carrier-protein |
| Metabolism | elongation.enoyl ACP reductase | | | | reductase NADH, chloroplast |
| | | | | | precursor, expressed |
| | lipid metabolism.FA synthesis and FA | LOC_Os08g06550 | 1.0487 | Downregulated | acyl CoA binding protein, |
| | elongation.acyl-CoA binding protein | | | | putative, expressed |
| | lipid metabolism.lipid transfer proteins | LOC_Os11g24070 | 0.5022 | Downregulated | LTPL10 - Protease |
| | etc | | | | inhibitor/seed storage/LTP |
| | | | | | family protein precursor, |
| | | | | | expressed |
| | lipid metabolism.″exotics″ (steroids, | LOC_Os08g04460 | −0.4169 | Upregulated | NADPH-dependent FMN |
| | squalene etc) | | | | reductase domain containing |
| | | | | | protein, expressed |
| | not assigned.unknown | LOC_Os07g11630 | −3.7085 | Upregulated | LTPL163 - Protease |
| | | | | | inhibitor/seed storage/LTP |
| | | | | | family protein precursor, |
| | | | | | expressed |
| | not assigned.unknown | LOC_Os01g60740 | 0.4782 | Downregulated | LTPL16 - Protease |
| | | | | | inhibitor/seed storage/LTP |
| | | | | | family protein precursor, |
| | | | | | expressed |
| | not assigned.unknown | LOC_Os10g36170 | 0.6033 | Downregulated | LTPL160 - Protease |
| | | | | | inhibitor/seed storage/LTP |
| | | | | | family protein precursor, |
| | | | | | expressed |
| Amino Acid | amino acid metabolism.synthesis.central | LOC_Os08g36320 | 1.1556 | Downregulated | decarboxylase, putative, |
| Metabolism | amino acid | | | | expressed |
| | metabolism.GABA.Glutamate | | | | |
| | decarboxylase | | | | |
| | amino acid metabolism.synthesis.central | LOC_Os02g55420 | 0.0680 | Downregulated | aminotransferase, classes I and |
| | amino acid | | | | II, domain containing protein, |
| | metabolism.aspartate.aspartate | | | | expressed |
| | aminotransferase | | | | |
| | amino acid metabolism.synthesis.central | LOC_Os01g55540 | −1.4791 | Upregulated | aminotransferase, classes I and |
| | amino acid | | | | II, domain containing protein, |
| | metabolism.aspartate.aspartate | | | | expressed |
| | aminotransferase | | | | |
| | amino acid metabolism.synthesis.central | LOC_Os10g25130 | −2.3369 | Upregulated | aminotransferase, classes I and |
| | amino acid metabolism.alanine.alanine | | | | II, domain containing protein, |
| | aminotransferase | | | | expressed |
| | amino acid metabolism.synthesis.central | LOC_Os07g42600 | 0.4995 | Downregulated | aminotransferase, classes I and |
| | amino acid metabolism.alanine.alanine | | | | II, domain containing protein, |
| | aminotransferase | | | | expressed |
| | amino acid metabolism.synthesis.central | LOC_Os08g39300 | −0.1161 | Upregulated | aminotransferase, putative, |
| | amino acid metabolism.alanine.alanine- | | | | expressed |
| | glyoxylate aminotransferase | | | | |
| | amino acid | LOC_Os02g47590 | −0.2841 | Upregulated | ornithine carbamoyltransferase, |
| | metabolism. synthesis.glutamate | | | | putative, expressed |
| | family.arginine.ornithine | | | | |
| | carbamoyltransferase | | | | |
| | amino acid | LOC_Os01g22010 | −0.2171 | Upregulated | S-adenosylmethionine |
| | metabolism.synthesis.aspartate | | | | synthetase, putative, expressed |
| | family.methionine | | | | |
| | amino acid | LOC_Os01g46380 | 0.9291 | Downregulated | ketol-acid reductoisomerase, |
| | metabolism.synthesis.branched chain | | | | chloroplast precursor, putative, |
| | group.common | | | | expressed |
| | amino acid metabolism.synthesis.serine- | LOC_Os04g55720 | 0.2357 | Downregulated | D-3-phosphoglycerate |
| | glycine-cysteine | | | | dehydrogenase, chloroplast |
| | group.serine.phosphoglycerate | | | | precursor, putative, expressed |
| | dehydrogenase | | | | |
| | amino acid metabolism.synthesis.serine- | LOC_Os08g39300 | −0.1161 | Upregulated | aminotransferase, putative, |
| | glycine-cysteine group.glycine.serine | | | | expressed |
| | glyoxylate aminotransferase | | | | |
| | amino acid metabolism.synthesis.serine- | LOC_Os12g42980 | 0.0888 | Downregulated | cysteine synthase, putative, |
| | glycine-cysteine group.cysteine.OASTL | | | | expressed |
| | amino acid metabolism.synthesis.serine- | LOC_Os01g74650 | 0.0546 | Downregulated | cysteine synthase, |
| | glycine-cysteine group.cysteine.OASTL | | | | mitochondrial precursor, |
| | | | | | putative, expressed |
| | amino acid | LOC_Os09g36800 | −0.6866 | Upregulated | 3-dehydroquinate synthase, |
| | metabolism.synthesis.aromatic | | | | putative, expressed |
| | aa.chorismate.3-dehydroquinate synthase | | | | |
| | amino acid | LOC_Os03g04169 | −0.1991 | Upregulated | ATP phosphoribosyltransferase, |
| | metabolism.synthesis.histidine.ATP | | | | putative, expressed |
| | phosphoribosyl transferase | | | | |
| | amino acid | LOC_Os08g09250 | −0.0324 | Upregulated | glyoxalase family protein, |
| | metabolism.degradation.aspartate | | | | putative, expressed |
| | family.threonine | | | | |
| | amino acid | LOC_Os07g09060 | 0.8606 | Downregulated | aldehyde dehydrogenase, |
| | metabolism.degradation.branched-chain | | | | putative, expressed |
| | group.valine | | | | |
| | amino acid | LOC_Os01g51410 | −0.0856 | Upregulated | glycine dehydrogenase, |
| | metabolism.degradation.serine-glycine- | | | | putative, expressed |
| | cysteine group.glycine | | | | |
| | amino acid | LOC_Os04g53230 | 0.7379 | Downregulated | aminomethyltransferase, |
| | metabolism.degradation.serine-glycine- | | | | putative, expressed |
| | cysteine group.glycine | | | | |
| | amino acid | LOC_Os02g10310 | 1.5383 | Downregulated | fumarylacetoacetase, putative, |
| | metabolism.degradation.aromatic | | | | expressed |
| | aa.tyrosine | | | | |
| | amino acid | LOC_Os06g39344 | −0.3047 | Upregulated | enoyl-CoA hydratase/isomerase |
| | metabolism.degradation.aromatic | | | | family protein, putative, |
| | aa.tryptophan | | | | expressed |
| Secondary | secondary | LOC_Os08g38900 | −0.9877 | Upregulated | caffeoyl-CoA O- |
| Metabolism | metabolism.phenylpropanoids.lignin | | | | methyltransferase, putative, |
| | biosynthesis.CCoAOMT | | | | expressed |
| | secondary | LOC_Os08g38910 | −0.4764 | Upregulated | caffeoyl-CoA O- |
| | metabolism.phenylpropanoidslignin | | | | methyltransferase, putative, |
| | biosynthesis.CCoAOMT | | | | expressed |
| Hormones | hormone metabolism.abscisic | LOC_Os03g57690 | 0.3420 | Downregulated | aldehyde oxidase, putative, |
| | acid.synthesis-degradation | | | | expressed |
| | hormone metabolism.auxin.induced- | LOC_Os01g43090 | −0.4052 | Upregulated | oxidoreductase, aldo/keto |
| | regulated-responsive-activated | | | | reductase family protein, |
| | | | | | putative, expressed |
| | hormone metabolism.auxin.induced- | LOC_Os03g58170 | −0.1093 | Upregulated | stem-specific protein TSJT1, |
| | regulated-responsive-activated | | | | putative, expressed |
| Stress - Related | stress | LOC_Os02g43020 | −0.1599 | Upregulated | heat shock protein STI, |
| Proteins | | | | | putative, expressed |
| | stress.biotic | LOC_Os10g39680 | 0.1957 | Downregulated | CHIT14 - Chitinase family |
| | | | | | protein precursor, expressed |
| | stress.biotic | LOC_Os04g41620 | 0.2360 | Downregulated | CHIT2 - Chitinase family |
| | | | | | protein precursor, expressed |
| | stress.biotic | LOC_Os07g11510 | −2.2587 | Upregulated | RAL6 - Seed allergenic protein |
| | | | | | RA5/RA14/RA17 precursor, |
| | | | | | expressed |
| | stress.biotic | LOC_Os07g11330 | −3.6452 | Upregulated | RAL2 - Seed allergenic protein |
| | | | | | RA5/RA14/RA17 precursor, |
| | | | | | expressed |
| | stress.biotic | LOC_Os07g11380 | −3.7525 | Upregulated | RAL4 - Seed allergenic protein |
| | | | | | RA5/RA14/RA17 precursor, |
| | | | | | expressed |
| | stress.biotic | LOC_Os03g46070 | −0.3440 | Upregulated | thaumatin, putative, expressed |
| | stress.biotic | LOC_Os07g11410 | −2.0776 | Upregulated | RALS - Seed allergenic protein |
| | | | | | RA5/RA14/RA17 precursor, |
| | | | | | expressed |
| | stress.biotic | LOC_Os10g34930 | 0.0366 | Downregulated | secretory protein putative, |
| | | | | | expressed |
| | stress.biotic.PR-proteins.proteinase | LOC_Os04g44470 | −2.6935 | Upregulated | KUN1 - Kunitz-type trypsin |
| | inhibitors.trypsin inhibitor | | | | inhibitor precursor, expressed |
| | stress.abiotic.heat | LOC_Os09g30412 | 0.2260 | Downregulated | heat shock protein, putative, |
| | | | | | expressed |
| | stress.abiotic.heat | LOC_Os02g02410 | −1.2578 | Upregulated | DnaK family protein, putative, |
| | | | | | expressed |
| | stress.abiotic.heat | LOC_Os02g48110 | −1.2334 | Upregulated | DnaK family protein, putative, |
| | | | | | expressed |
| | stress.abiotic.heat | LOC_Os01g62290 | 0.8692 | Downregulated | DnaK family protein, putative, |
| | | | | | expressed |
| | stress.abiotic.heat | LOC_Os03g02260 | 0.5838 | Downregulated | DnaK family protein, putative, |
| | | | | | expressed |
| | stress.abiotic.heat | LOC_Os03g60620 | −1.0429 | Upregulated | DnaK family protein, putative, |
| | | | | | expressed |
| | stress.abiotic.heat | LOC_Os08g38086 | −0.2952 | Upregulated | heat shock protein, putative, |
| | | | | | expressed |
| | stress.abiotic.heat | LOC_Os04g01740 | 0.5565 | Downregulated | heat shock protein, putative, |
| | | | | | expressed |
| | stress.abiotic.heat | LOC_Os03g31300 | −0.2978 | Upregulated | chaperone protein clpB 1, |
| | | | | | putative, expressed |
| | stress.abiotic.heat | LOC_Os03g16040 | −0.2767 | Upregulated | hsp20/alpha crystallin family |
| | | | | | protein, putative, expressed |
| | stress.abiotic.heat | LOC_Os03g15960 | 1.5066 | Downregulated | hsp20/alpha crystallin family |
| | | | | | potent, puutuve, expressed |
| Redox - Related | stress.abiotic.heat | LOC_Os01g04370 | 1.5200 | Downregulated | hsp20/alpha crystallin family |
| Proteins | | | | | protein, putative, expressed |
| | stress.abiotic.heat | LOC_Os05g44340 | −1.4170 | Upregulated | heat shock protein 101, |
| | | | | | putative, expressed |
| | stress.abiotic.heat | LOC_Os01g08560 | −0.1604 | Upregulated | DnaK family protein, putative, |
| | | | | | expressed |
| | stress.abiotic.heat | LOC_Os05g38530 | 0.9983 | Downregulated | DnaK family protein, putative, |
| | | | | | expressed |
| | stress.abiotic.heat | LOC_Os02g53420 | 0.1441 | Downregulated | DnaK family protein, putative, |
| | | | | | expressed |
| | stress.abiotic.heat | LOC_Os11g47760 | −0.6065 | Upregulated | DnaK family protein, putative, |
| | | | | | expressed |
| | stress.abiotic.heat | LOC_Os05g35400 | −0.9377 | Upregulated | DnaK family protein, putative, |
| | | | | | expressed |
| | stress.abiotic.heat | LOC_Os06g50300 | 0.1202 | Downregulated | heat shock protein, putative, |
| | | | | | expressed |
| | stress.abiotic.cold | LOC_Os08g03520 | 0.5390 | Downregulated | retrotransposon protein, |
| | | | | | putative, Ty1-copia subclass, |
| | | | | | expressed |
| | stress.abiotic.unspecified | LOC_Os09g39950 | 1.5346 | Downregulated | POEI23 - Pollen Ole e I |
| | | | | | allergen and extensin family |
| | | | | | protein precursor, expressed |
| | stress.abiotic.unspecified | LOC_Os08g35760 | 0.2065 | Downregulated | Cupin domain containing |
| | | | | | protein, expressed |
| | stress.abiotic.unspecified | LOC_Os01g14670 | 2.7465 | Downregulated | Cupin domain containing |
| | | | | | protein, expressed |
| | | | | | pathogenesis-related Bet v I |
| | not assigned.unknown | LOC_Os08g28670 | −1.1951 | Upregulated | family protein, putative, |
| | | | | | expressed |
| | not assigned.unlmown | LOC_Os07g41810 | −2.2856 | Upregulated | stress responsive A/B Barrel |
| | | | | | domain containing protein, |
| | | | | | expressed |
| | not assigned.unknown | LOC_Os03g21040 | −0.5425 | Upregulated | stress responsive protein, |
| | | | | | putative, expressed |
| | not assigned.unknown | LOC_Os05g46480 | 0.4281 | Downregulated | late embryogenesis abundant |
| | | | | | protein, group 3, putative, |
| | | | | | expressed |
| | redox.thioredoxin | LOC_Os11g09280 | −2.7473 | Upregulated | OsPDIL1-1 protein disulfide |
| | | | | | isomerase PDIL1-1, expressed |
| | redox.thioredoxin | LOC_Os01g68480 | 0.0593 | Downregulated | thioredoxin, putative, expressed |
| | redox.thioredoxin | LOC_Os07g08840 | 0.1347 | Downregulated | thioredoxin, putative, expressed |
| | redox.thioredoxin | LOC_Os02g01010 | −1.9793 | Upregulated | OsPDIL1-4 protein disulfide |
| | | | | | isomerase PDIL1-4, expressed |
| | redox.ascorbate and glutathione.ascorbate | LOC_Os05g02530 | 0.7293 | Downregulated | glutathione S-transferase, N- |
| | | | | | terminal domain containing |
| | | | | | protein, expressed |
| | redox.ascorbate and glutathione.ascorbate | LOC_Os08g44340 | 1.4738 | Downregulated | monodehydroascorbate |
| | | | | | reductase, putative, expressed |
| | redox.ascorbate and glutathione.ascorbate | LOC_Os12g07820 | −1.2455 | Upregulated | OsAPx6 - Stromal Ascorbate |
| | | | | | Peroxidase encoding gene 5,8, |
| | | | | | expressed |
| | redox.ascorbate and glutathione.ascorbate | LOC_Os09g39380 | −0.1827 | Upregulated | monodehydroascorbate |
| | | | | | reductase, putative, expressed |
| | redox.ascorbate and glutathione.ascorbate | LOC_Os07g49400 | 0.0966 | Downregulated | OsAPx2 - Cytosolic Ascorbate |
| | | | | | Peroxidase encoding gene |
| | | | | | 4,5,6,8, expressed |
| | redox.ascorbate and glutathione.ascorbate | LOC_Os03g17690 | 0.3218 | Downregulated | OsAPx1 - Cytosolic Ascorbate |
| | | | | | Peroxidase encoding gene 1-8, |
| | | | | | expressed |
| | redox.ascorbate and | LOC_Os02g56850 | 0.7565 | Downregulated | glutathione reductase, putative, |
| | glutathione.glutathione | | | | expressed |
| | redox.glutaredoxins | LOC_Os04g42930 | 0.9443 | Downregulated | OsGrx_C2.2 - glutaredoxin |
| | | | | | subgroup I, expressed |
| | redox.peroxiredoxin | LOC_Os06g09610 | 1.0303 | Downregulated | peroxiredoxin, putative, |
| | | | | | expressed |
| | redox.peroxiredoxin | LOC_Os01g48420 | 0.3974 | Downregulated | peroxiredoxin, putative, |
| | | | | | expressed |
| | redox.peroxiredoxin | LOC_Os02g09940 | 1.0529 | Downregulated | peroxiredoxin, putative, |
| | | | | | expressed |
| | redox.peroxiredoxin.BAS1 | LOC_Os02g33450 | 0.1564 | Downregulated | peroxiredoxin, putative, |
| | | | | | expressed |
| | redox.dismutases and catalases | LOC_Os05g25850 | −0.0756 | Upregulated | superoxide dismutase, |
| | | | | | mitochondrial precursor, |
| | | | | | putative, expressed |
| | redox.dismutases and catalases | LOC_Os07g46990 | 1.2151 | Downregulated | copper/zinc superoxide |
| | | | | | dismutase, putative, expressed |
| | redox.dismutases and catalases | LOC_Os02g02400 | 0.5274 | Downregulated | catalase isozyme A, putative, |
| | | | | | expressed |
| | redox.dismutases and catalases | LOC_Os08g44770 | 0.8000 | Downregulated | copper/zinc superoxide |
| | | | | | dismutase, putative, expressed |
| | misc.glutathione S transferases | LOC_Os01g55830 | 0.5385 | Downregulated | glutathione S-transferase, |
| | | | | | putative, expressed |
| | misc.glutathione S transferases | LOC_Os01g27360 | −0.0515 | Upregulated | glutathione S-transferase, |
| | | | | | putative, expressed |
| | misc.glutathione S transferases | LOC_Os10g38700 | 0.0612 | Downregulated | glutathione S-transferase, |
| | | | | | putative, expressed |
| | misc.glutathione S transferases | LOC_Os03g04220 | 0.5483 | Downregulated | glutathione S-transferase, |
| | | | | | putative, expressed |
| | misc.peroxidases | LOC_Os09g29490 | 0.6445 | Downregulated | peroxidase precursor, putative, |
| | | | | | expressed |
| | misc.peroxidases | LOC_Os01g22230 | −0.2377 | Upregulated | peroxidase precursor, putative, |
| | | | | | expressed |
| | misc.peroxidases | LOC_Os07g48020 | −0.5612 | Upregulated | peroxidase precursor, putative, |
| | | | | | expressed |
| Nucleotide | nucleotide | LOC_Os02g41590 | −0.0175 | Upregulated | kinase, pfkB family, putative, |
| Metabolism | metabolism.salvage.nucleoside | | | | expressed |
| | kinases.adenosine kinase | | | | |
| | nucleotide metabolism.phosphotransfer | LOC_Os05g51700 | −0.0434 | Upregulated | nucleoside diphosphate kinase, |
| | and pyrophosphatases.nucleoside | | | | putative, expressed |
| | diphosphate kinase | | | | |
| | nucleotide metabolism.phosphotransfer | LOC_Os10g41410 | −1.2549 | Upregulated | nucleoside diphosphate kinase, |
| | and pyrophosphatases.nucleoside | | | | putative, expressed |
| | diphosphate kinase | | | | |
| | nucleotide metabolism.phosphotransfer | LOC_Os07g30970 | 0.0015 | Downregulated | nucleoside diphosphate kinase, |
| | and pyrophosphatases.nucleoside | | | | putative, expressed |
| | diphosphate kinase | | | | |
| | nucleotide metabolism.phosphotransfer | LOC_Os04g59040 | 0.0943 | Downregulated | soluble inorganic |
| | and pyrophosphatases.misc | | | | pyrophosphatase, putative, |
| | | | | | expressed |
| | DNA.synthesis/chromatin structure | LOC_Os02g05330 | 0.3958 | Downregulated | DEAD-box ATP-dependent |
| | | | | | RNA helicase, putative, |
| | | | | | expressed (″DEAD″ disclosed |
| | | | | | as SEQ ID NO: 181) |
| | DNA.repair | LOC_Os01g36090 | 0.3489 | Downregulated | DNA-damage-repair/toleration |
| | | | | | protein DRT102, putative, |
| | | | | | expressed |
| | DNA.unspecified | LOC_Os01g13700 | −0.0045 | Upregulated | DNA-binding protein-related, |
| | | | | | putative, expressed |
| Miscellaneous | Biodegradation of Xenobiotics | LOC_Os08g09250 | −0.0324 | Upregulated | glyoxalase family protein, |
| Enzymes | | | | | putative, expressed |
| | misc.misc2 | LOC_Os01g34700. | 0.2412 | Downregulated | dienelactone hydrolase family |
| | | | | | protein, expressed |
| | misc.misc2 | LOC_Os05g33100 | 0.3476 | Downregulated | endo-1,3;1,4-beta-D-glucanase |
| | | | | | precursor, putative, expressed |
| | misc.O-methyl transferases | LOC_Os08g06100 | −0.6499 | Upregulated | O-methyltransferase, putative, |
| | | | | | expressed |
| | misc.oxidases - copper, flavone etc. | LOC_Os08g29170 | −0.0531 | Upregulated | dehydrogenase, putative, |
| | | | | | expressed |
| | misc.nitrilases, *nitrile lyases, berberine | LOC_Os06g35590 | 1.5422 | Downregulated | reticuline oxidase-like protein |
| | bridge enzymes, reticuline oxidases, | | | | precursor, putative, expressed |
| | troponine reductases | | | | |
| | misc.alcohol dehydrogenases | LOC_Os08g43190 | −1.3744 | Upregulated | dehydrogenase, putative, |
| | | | | | expressed |
| | misc.myrosinases-lectin-jacalin | LOC_Os01g24710 | 2.4570 | Downregulated | jacalin-like lectin domain |
| | | | | | containing protein, expressed |
| | misc.short chain | LOC_Os04g44950 | −0.3304 | Upregulated | short-chain |
| | dehydrogenase/reductase (SDR) | | | | dehydrogenase/reductase, |
| | | | | | putative, expressed |
| RNA | RNA.processing.ribonucleases | LOC_Os08g33710 | 0.6885 | Downregulated | ribonuclease T2 family domain |
| Processing | | | | | containing protein, expressed |
| | RNA.processing.ribonucleases | LOC_Os07g33240 | −0.1039 | Upregulated | endoribonuclease, putative, |
| | | | | | expressed |
| | RNA.regulation of transcription.Zn- | LOC_Os02g32350 | −0.9490 | Upregulated | TUDOR protein with multiple |
| | finger(CCHC) | | | | SNc domains, putative, |
| | | | | | expressed |
| | RNA.regulation of | LOC_Os04g31700 | −0.4509 | Upregulated | methylisocitrate lyase 2, |
| | transcription.unclassified | | | | putative, expressed |
| | RNA.regulation of | LOC_Os01g13700 | −0.0045 | Upregulated | DNA-binding protein-related, |
| | transcription.unclassified | | | | putative, expressed |
| | RNA.RNA binding | LOC_Os09g10760 | −0.0249 | Upregulated | RNA recognition motif |
| | | | | | containing protein, putative, |
| | | | | | expressed |
| | RNA.RNA binding | LOC_Os09g39180 | −0.0152 | Upregulated | RNA recognition motif |
| | | | | | containing protein, putative, |
| | | | | | expressed |
| Protein | N-metabolism.ammonia | LOC_Os07g46460 | −1.2889 | Upregulated | ferredoxin-dependent glutamate |
| Metabolism, | metabolism.glutamate synthase | | | | synthase, chloroplast precursor, |
| Synthesis and | | | | | putative, expressed |
| Degradation | N-metabolism.ammonia | LOC_Os02g50240 | −0.1724 | Upregulated | glutamine synthetase, catalytic |
| | metabolism.glutamine synthase | | | | domain containing protein, |
| | | | | | expressed |
| | N-metabolism.ammonia | LOC_Os04g56400 | 0.5629 | Downregulated | glutamine synthetase, catalytic |
| | metabolism.glutamine synthase | | | | domain containing protein, |
| | | | | | expressed |
| | protein.synthesis.ribosomal | LOC_Os01g47330 | 1.8344 | Downregulated | ribosomal protein L7/L12 C- |
| | protein.prokaryotic.chloroplast.50S | | | | terminal domain containing |
| | subunit.L12 | | | | protein, expressed |
| | protein.synthesis.ribosomal | LOC_Os03g38000 | −1.1640 | Upregulated | 40S ribosomal protein S3-1, |
| | protein.eukaryotic.40S subunit.S3 | | | | putative, expressed |
| | protein.synthesis.ribosomal | LOC_Os03g08440 | −0.2717 | Upregulated | ribosomal protein S2, putative, |
| | Protein.eukaryotic.40S subunit.SA | | | | expressed |
| | protein.synthesis.ribosomal | LOC_Os07g10720 | −0.7793 | Upregulated | 40S ribosomal protein S15a, |
| | protein.eukaryotic.40S subunit.S15A | | | | putative, expressed |
| | protein.synthesis.ribosomal | LOC_Os01g67134 | −0.4599 | Upregulated | ribosomal L18p/L5e family |
| | protein.eukaryotic.60S subunit.L5 | | | | protein, putative, expressed |
| | protein.synthesis.ribosomal | LOC_Os08g13690 | −0.5173 | Upregulated | 60S ribosomal protein L7, |
| | protein.eukaryotic.60S subunit.L7 | | | | putative, expressed |
| | protein.synthesis.ribosomal | LOC_Os02g18380 | −0.5112 | Upregulated | 60S ribosomal protein L27-3, |
| | protein.eukaryotic.60S subunit.L27 | | | | putative, expressed |
| | protein.synthesis.ribosomal | LOC_Os08g03640 | −0.6702 | Upregulated | 60S acidic ribosomal protein |
| | protein.eukaryotic.60S subunit.P0 | | | | P0, putative, expressed |
| | protein.synthesis.ribosomal | LOC_Os05g37330 | 1.1622 | Downregulated | 60S acidic ribosomal protein, |
| | protein.eukaryotic.60S subunit.P2 | | | | putative, expressed |
| | protein.synthesis.ribosomal | LOC_Os01g13080 | −0.4186 | Upregulated | 60S acidic ribosomal protein, |
| | protein.eukaryotic.60S subunit.P3 | | | | putative, expressed |
| | protein.synthesis.initiation | LOC_Os03g55150 | 0.2479 | Downregulated | eukaryotic translation initiation |
| | | | | | factor 5A, putative, expressed |
| | protein.synthesis.initiation | LOC_Os07g40580 | −0.3394 | Upregulated | eukaryotic translation initiation |
| | | | | | factor 5A, putative, expressed |
| | protein.synthesis.elongation | LOC_Os02g12800 | −0.3715 | Upregulated | elongation factor 1-gamma, |
| | | | | | putative, expressed |
| | protein.synthesis.elongation | LOC_Os07g42300 | −0.4568 | Upregulated | elongation factor protein, |
| | | | | | putative, expressed |
| | protein.synthesis.elongation | LOC_Os03g08020 | 0.1874 | Downregulated | elongation factor Tu, putative, |
| | | | | | expressed |
| | protein.synthesis.elongation | LOC_Os03g08050 | 0.1874 | Downregulated | elongation factor Tu, putative, |
| | | | | | expressed |
| | protein.synthesis.elongation | LOC_Os02g32030. | 0.2202 | Downregulated | elongation factor, putative, |
| | | | | | expressed |
| | protein.synthesis.elongation | LOC_Os03g08010 | 0.1874 | Downregulated | elongation factor Tu, putative, |
| | | | | | expressed |
| | protein.targeting.secretory | LOC_Os01g59790 | 0.0847 | Downregulated | ADP-ribosylation factor, |
| | pathway.unspecified | | | | putative, expressed |
| | protein.postranslational modification | LOC_Os04g40600. | −0.4652 | Upregulated | peptide methionine sulfoxide |
| | | | | | reductase, putative, expressed |
| | protein.degradation | LOC_Os02g55140 | −0.1154 | Upregulated | leucine aminopeptidase, |
| | | | | | chloroplast precursor, putative, |
| | | | | | expressed |
| | protein.degradation.cysteine protease | | −0.2603 | Upregulated | oryzain alpha chain precursor, |
| | | | | | putative, expressed |
| | protein.degradation.serine protease | LOC_Os10g01134 | −0.1560 | Upregulated | OsSCP46 - Putative Serine |
| | | | | | Carboxypeptidase homologue, |
| | | | | | expressed |
| | protein.degradation.serine protease | LOC_Os04g32560 | 0.5961 | Downregulated | ATP-dependent Clp protease |
| | | | | | ATP-binding subunit clpA |
| | | | | | homolog CD4B,chloroplast |
| | | | | | precursor, putative, expressed |
| | protein.degradation.ubiquitin.ubiquitin | LOC_Os03g13170 | 0.0678 | Downregulated | ubiquitin fusion protein, |
| | | | | | putative, expressed |
| | protein.degradation.ubiquitin.E2 | LOC_Os01g48280 | −0.3306 | Upregulated | ubiquitin-conjugating enzyme, |
| | | | | | putative, expressed |
| | protein.degradation.ubiquitin.proteasom | LOC_Os05g09490 | −0.1796 | Upregulated | peptidase, T1 family, putative, |
| | | | | | expressed |
| | protein.degradation.ubiquitin.proteasom | LOC_Os01g59600 | −0.1712 | Upregulated | peptidase, T1 family, putative, |
| | | | | | expressed |
| | protein.degradation.ubiquitin.proteasom | LOC_Os02g53060 | 0.3061 | Downregulated | peptidase, T1 family, putative, |
| | | | | | expressed |
| | protein.degradation.ubiquitin.proteasom | LOC_Os02g56000 | −0.5454 | Upregulated | 26S protease regulatory subunit |
| | | | | | 6A, putative, expressed |
| | protein.degradation.ubiquitin.proteasom | LOC_Os06g06030 | 0.0959 | Downregulated | peptidase, T1 family, putative, |
| | | | | | expressed |
| | protein.degradation.ubiquitin.proteasom | LOC_Os04g36700 | 0.6341 | Downregulated | proteasome subunit putative, |
| | | | | | expressed |
| | protein.degradation.ubiquitin.proteasom | LOC_Os02g04100 | −0.2910 | Upregulated | peptidase, T1 family, putative, |
| | | | | | expressed |
| | protein.degradation.ubiquitin.proteasom | LOC_Os03g08280 | −0.5019 | Upregulated | peptidase, T1 family, putative, |
| | | | | | expressed |
| | protein.degradation.ubiquitin.proteasom | LOC_Os03g48930 | −0.1722 | Upregulated | peptidase, T1 family, putative, |
| | | | | | expressed |
| | protein.folding | LOC_Os09g26730 | 0.6859 | Downregulated | chaperonin, putative, expressed |
| | protein.folding | LOC_Os06g02380 | −0.4236 | Upregulated | T-complex protein, putative, |
| | | | | | expressed |
| | protein.folding | LOC_Os02g39870 | −0.1779 | Upregulated | co-chaperone GrpE protein, |
| | | | | | putative, expressed |
| | protein.folding | LOC_Os07g44740 | 0.2354 | Downregulated | chaperonin, putative, expressed |
| | protein.folding | LOC_Os06g09688 | −0.3274 | Upregulated | chaperonin, putative, expressed |
| | protein.folding | LOC_Os10g32550 | 0.1087 | Downregulated | T-complex protein, putative, |
| | | | | | expressed |
| Signaling | signalling.receptor kinases.misc | LOC_Os06g41560 | 0.1485 | Downregulated | receptor-like protein kinase, |
| Proteins | | | | | putative, expressed |
| | signalling.calcium | LOC_Os08g44660 | 3.1484 | Downregulated | EF hand family protein, |
| | | | | | putative, expressed |
| | signalling.calcium | LOC_Os03g29770 | 1.0111 | Downregulated | EF hand family protein, |
| | | | | | expressed |
| | signalling.calcium | LOC_Os07g48780 | 2.5072 | Downregulated | OsCam1-2 - Calmodulin |
| | | | | | expressed |
| | signalling.calcium | LOC_Os07g14270 | −1.0132 | Upregulated | calreticulin precursor protein, |
| | | | | | putative, expressed |
| | signalling.calcium | LOC_Os03g20370 | 2.5072 | Downregulated | OsCam1-1 - Calmodulin |
| | | | | | expressed |
| | signalling.G-proteins | LOC_Os07g31370 | −0.5342 | Upregulated | ms-related protein, putative, |
| | | | | | expressed |
| | signalling.G-proteins | LOC_Os01g37800 | −0.3751 | Upregulated | ras-related protein, putative, |
| | | | | | expressed |
| | signalling.G-proteins | LOC_Os05g49890 | −0.9823 | Upregulated | ras-related protein, putative, |
| | | | | | expressed |
| | signalling.G-proteins | LOC_Os01g15010 | 0.0147 | Downregulated | miro, putative, expressed |
| | signalling.14-3-3 proteins | LOC_Os08g33370 | −0.7621 | Upregulated | 14-3-3 protein putative, |
| | | | | | expressed |
| | signalling.14-3-3 proteins | LOC_Os08g37490 | −0.6166 | Upregulated | 14-3-3 protein putative, |
| | | | | | expressed |
| | signalling.14-3-3 proteins | LOC_Os03g50290 | −0.0962 | Upregulated | 14-3-3 protein putative, |
| | | | | | expressed |
| | signalling.14-3-3 proteins | LOC_Os02g36974 | −1.0262 | Upregulated | 14-3-3 protein putative, |
| | | | | | expressed |
| Development - | development.storage proteins | LOC_Os03g57960 | −3.1262 | Upregulated | cupin domain containing |
| Related Proteins | | | | | protein, expressed |
| | development.storage proteins | LOC_Os05g02520 | 0.0517 | Downregulated | cupin domain containing |
| | | | | | protein, expressed |
| | development.unspecified | LOC_Os01g49290 | −1.4699 | Upregulated | WD repeat-containing protein, |
| | | | | | putative, expressed |
| | not assigned.unknown | LOC_Os05g41970 | −4.1859 | Upregulated | SSA1 - 2S albumin seed |
| | | | | | storage family protein |
| | | | | | precursor, expressed |
| Transport | transport.- and v-ATPases.H+- | LOC_Os06g45120 | 0.1731 | Downregulated | ATP synthase, putative, |
| Proteins | transporting two-sector ATPase | | | | expressed |
| | transport.p- and v-ATPases.H+- | LOC_Os06g37180 | −0.3423 | Upregulated | ATP synthase, putative, |
| | transporting two-sector ATPase | | | | expressed |
| | transport.misc | LOC_Os05g35460 | 0.9191 | Downregulated | patellin protein, putative, |
| | | | | | expressed |
| Unassigned | gluconeogenesis.Malate DH | LOC_Os03g56280 | −0.0558 | Upregulated | lactate/malate dehydrogenase, |
| Classes | | | | | putative, expressed |
| | gluconeogenese/glyoxylate | LOC_Os05g33570 | −1.9356 | Upregulated | pyruvate, phosphate dikinase, |
| | cycle.pyruvate dikinase | | | | chloroplast precursor, putative, |
| | | | | | expressed |
| | metal handling | LOC_Os01g68770 | −0.0763 | Upregulated | selenium-binding protein, |
| | | | | | putative, expressed |
| | Co-factor and vitamine metabolism.folate | LOC_Os09g36800 | −0.6866 | Upregulated | 3-dehydroquinate synthase, |
| | & vitamine K | | | | putative, expressed |
| | not assigned.unknown | LOC_Os01g71300 | −0.1383 | Upregulated | S-formylglutathione hydrolase, |
| | | | | | putative, expressed |
| | not assigned.unknown | LOC_Os03g22460 | −0.1045 | Upregulated | expressed protein |
| | not assigned.unknown | LOC_Os02g55810 | 1.8521 | Downregulated | CXXXC9 - Cysteine-rich |
| | | | | | protein with paired CXXXC |
| | | | | | motifs precursor, expressed |
| | not assigned.unknown | LOC_Os09g17660 | 0.4829 | Downregulated | expressed protein |
| | not assigned.unknown | LOC_Os11g06570 | −0.5549 | Upregulated | transposon protein, putative, |
| | | | | | CACTA, En/Spm sub-class, |
| | | | | | expressed |
| | not assigned.unknown | LOC_Os03g60509 | −0.1358 | Upregulated | expressed protein |

[0306] Protein and Metabolite Factors for Better Source and Sink Capacity for Yield Under Drought.

[0307] Compared to Vandana, higher sucrose and starch content in the flag leaf as well as in the spikelets of the 481-B during stress, indicated better source and sink capacity in the 481-B (FIGS. 30, 31). This was further supported by the observation that although the activity of two starch biosynthesis enzymes, Glucose-1-phosphate adenylyltransferase and sucrose synthase is known to be acutely impaired under drought (Ahmadi and Baker, 2001; Smith et al., 1997), the flag leaf and the spikelets of the 481-B contained larger amounts of these enzymes than the Vandana flag leaf and spikelets (FIGS. 25, 31E-31F). The other key proteins identified for carbohydrate metabolism were starch branching enzyme (1,4-α-glucan branching enzyme), β-amylase and adenylate kinase. β-amylases degrade starch to maltose in a series of reactions to supply energy and carbon skeletons for metabolism during dark period (Smith et al., 2005; He et al., 2011). In the spikelets of the 481-B, β-amylase was down-regulated (FIG. 25). This showed reduced starch degradation consistent with the presence of higher starch in the spikelets of the 481-B (FIG. 31D). A higher amount of starch indicates reduced adenylate kinase (Oliver et al., 2008) and the spikelets of the 481-B exhibited adenylate kinase down-regulation (FIG. 31G). A higher amount of starch in the spikelets of the 481-B also explains the observation of upregulated sucrose synthase and 1,4-α-glucan branching enzyme (FIGS. 25, 31F). Additionally, thioredoxins were upregulated in spikelets of the 481-B (FIG. 25) where they may be involved in the post-translational redox-activation of ADP23 glucose pyrophosphorylase (Meyer et al., 1999; Tiessen et al., 2002; Oliver et al., 2008) towards starch synthesis. Down-regulation of thioredoxins in flag leaf (FIG. 25) showed that despite the upregulated AGPase, starch synthesis is inhibited as observed (FIG. 30D) and simple sugars accumulated for translocation towards spikelets.

[0308] Proteomic data also showed down-regulation of the glycolysis related proteins in flag leaf of the 481-B compared to Vandana. The respiratory pathways are generally accelerated during drought stress (Haupt-Herting et al., 2001). However, Glyceraldehyde 3-phosphate dehydrogenase, phosphoglucomutase, glucose 6-phosphate isomerase and enolase were down-regulated in the flag leaf and spikelets of 481-B (FIG. 24) indicating down-regulation of glycolysis and more sugars available in the flag leaf and the spikelets (FIGS. 30, 31) to serve as osmoticum and as a source for starch synthesis respectively. Taken together the proteome data for carbohydrate metabolism and the metabolite data 1 for sugars and starch indicate that better yield in the 481-B resides in better assimilate source and sink capacity and better translocation/remobilization capacity of the 481-B.

[0309] Additionally, amino acids play a key role in cellular processes during grain filling. They serve as precursors feeding into other anabolic pathways; play a major anaplerotic role to feed the intermediates of the TCA cycle (Ashraf and Foolad, 2007; Sweetlove et al., 2010); may act as osmolytes under drought (Verslues and Sharma, 2010) and define the overall N status. Newly acquired N is insufficient for the high demands during grain filling and N remobilization and partitioning are crucial for grain filling. Reduction of glutamate noticed in the flag leaf under drought occurs due to its translocation, to the spikelets, which show higher glutamate in the spikelets of the 481-B only (FIGS. 32A-32C), indicating better remobilization capacity of the 481-B. Another transportable amino acid aspartate is also present in larger amounts in the spikelets of the 481-B (FIG. 32C). Overall, better N remobilization from flag leaf to spikelets in the 481-B compared to the parents was observed (FIG. 38).

TABLE 7
The complete set of proteins identified in roots of Vandana and the 481B NIL (in triplicates),
represented as fold increase in the 481B NIL compared to Vandana during drought stress.

| | | | Log 2 | | |
|---|---|---|---|---|---|
| Gene Ontology | MapMan Bin Description | Locus Id's | Ratio | | MSU v7.0 description |
| e-Carrier | PS.lightreaction.other | LOC_Os03g61960 | 1.6104 | Downregulated | 2Fe-2S iron-sulfur cluster binding domain |
| | electron carrier | | | | containing protein, expressed |
| | (ox/red).ferredoxin | | | | |
| Calvin | PS.calvin | LOC_Os06g45710 | −2.0766 | Upregulated | phosphoglycerate kinase protein, putative, |
| Cycle | cycle.phosphoglycerate | | | | expressed |
| | kinase | | | | |
| | PS.calvin | LOC_Os02g07260 | −2.3320 | Upregulated | phosphoglycerate kinase protein, putative, |
| | cycle.phosphoglycerate | | | | expressed |
| | kinase | | | | |
| | PS.calvin cycle.TPI | LOC_Os01g05490 | −1.6061 | Upregulated | triosephosphate isomerase, cytosolic, |
| | | | | | putative, expressed |
| | PS.calvin cycle.aldolase | LOC_Os01g67860 | −2.4698 | Upregulated | fructose-bisphospate aldolase isozyme, |
| | | | | | putative, expressed |
| CHO | major CHO | LOC_Os06g09450 | −2.8827 | Upregulated | sucrose synthase, putative, expressed |
| Metabolism | metabolism.degradation.sucrose. | | | | |
| | Susy | | | | |
| Glycolysis | glycolysis.cytosolic | LOC_Os08g03290 | −2.0223 | Upregulated | glyceraldehyde-3-phosphate |
| | branch.glyceraldehyde 3- | | | | dehydrogenase, putative, expressed |
| | phosphate dehydrogenase | | | | |
| | (GAP-DH) | | | | |
| | glycolysis.cytosolic | LOC_Os02g38920 | −2.1735 | Upregulated | glyceraldehyde-3-phosphate |
| | branch.glyceraldehyde 3- | | | | dehydrogenase, putative, expressed |
| | phosphate dehydrogenase | | | | |
| | (GAP-DH) | | | | |
| | glycolysis.cytosolic | LOC_Os10g08550 | −1.6314 | Upregulated | enolase, putative, expressed |
| | branch.enolase | | | | |
| | not assigned.unknown | LOC_Os03g50480 | −2.4066 | Upregulated | phosphoglucomutase, putative, expressed |
| Oxidadtive | OPP.non-reductive | LOC_Os01g70170 | −3.6772 | Upregulated | transaldolase, putative, expressed |
| Pentose | PP.transaldolase | | | | |
| Phosphate | | | | | |
| Pathway | | | | | |
| TCA Cycle | TCA/org. | LOC_Os01g22520 | 0.5806 | Downregulated | dihydrolipoyl dehydrogenase 1, |
| | transformation.TCA.pyruvate | | | | mitochondrial precursor, putative, |
| | DH.E3 | | | | expressed |
| | TCA/org. | LOC_Os05g49880 | −1.9303 | Upregulated | lactate/malate dehydrogenase, putative, |
| | transformation.TCA.malate | | | | expressed |
| | DH | | | | |
| | TCA/org. | LOC_Os10g33800 | −2.2644 | Upregulated | lactate/malate dehydrogenase, putative, |
| | transformation.other organic | | | | expressed |
| | acid transformaitons.cyt | | | | |
| | MDH | | | | |
| Mitochondrial | mitochondrial electron | LOC_Os03g27290 | 1.8064 | Downregulated | cytochrome c oxidase subunit, putative, |
| Electron | transport/ATP | | | | expressed |
| Transport | synthesis.cytochrome c | | | | |
| Chain | oxidase | | | | |
| | mitochondrial electron | LOC_Os07g42910 | 0.1653 | Downregulated | cytochrome c oxidase subunit, putative, |
| | transport/ATP | | | | expressed |
| | synthesis.cytochrome c | | | | |
| | oxidase | | | | |
| | mitochondrial electron | LOC_Os08g37320 | 1.8375 | Downregulated | expressed protein |
| | transport/ATP synthesis.F1- | | | | |
| | ATPase | | | | |
| | mitochondrial electron | LOC_Os07g31300 | 1.8367 | Downregulated | ATP synthase delta chain, mitochondrial |
| | transport/ATP synthesis.F1- | | | | precursor, putative, expressed |
| | ATPase | | | | |
| | mitochondrial electron | LOC_Os05g47980 | −1.3455 | Upregulated | ATP synthase, putative, expressed |
| | transport/ATP synthesis.F1- | | | | |
| | ATPase | | | | |
| Cell and | cell wall.cell wall | LOC_Os01g47780 | 0.7048 | Downregulated | fasciclin domain containing protein, |
| Cell Wall - | proteins.AGPs.AGP | | | | expressed |
| Related | cell wall.cell wall | LOC_Os05g48890 | 0.5626 | Downregulated | fasciclin domain containing protein, |
| Proteins | proteins.AGPs.AGP | | | | expressed |
| | cell wall.cell wall | LOC_Os01g06580 | 0.1585 | Downregulated | fasciclin domain containing protein, |
| | proteins.AGPs.AGP | | | | expressed |
| | cell.organisation | LOC_Os09g33810 | 0.8809 | Downregulated | ankyrin repeat domain containing protein, |
| | | | | | putative, expressed |
| | cell.organisation | LOC_Os07g38730 | −3.1326 | Upregulated | tubulin/FtsZ domain containing protein, |
| | | | | | putative, expressed |
| | cell.organisation | LOC_Os01g64630 | −2.7243 | Upregulated | actin, putative, expressed |
| | cell.organisation | LOC_Os03g60580 | 2.1547 | Downregulated | actin-depolymerizing factor, putative, |
| | | | | | expressed |
| | cell.organisation | LOC_Os03g48540 | −0.0225 | Upregulated | expressed protein |
| | cell.organisation | LOC_Os06g46000 | −2.6175 | Upregulated | tubulin/FtsZ domain containing protein, |
| | | | | | putative, expressed |
| | cell.organisation | LOC_Os11g14220 | −3.4083 | Upregulated | tubulin/FtsZ domain containing protein, |
| | | | | | putative, expressed |
| | not assigned.unknown | LOC_Os05g39250 | 1.9046 | Downregulated | phosphatidylethanolamine-binding |
| | | | | | protein, putative, expressed |
| | not assigned.unknown | LOC_Os03g04110 | −0.9124 | Upregulated | lysM domain-containing GPI-anchored |
| | | | | | protein precursor, putative, expressed |
| Lipid | lipid metabolism.FA | LOC_Os08g06550 | 2.4541 | Downregulated | acyl CoA binding protein, putative, |
| Metabolism | synthesis and FA | | | | expressed |
| | elongation.acyl-CoA binding | | | | |
| | protein | | | | |
| | lipid metabolism.″exotics″ | LOC_Os08g04460 | −1.0480 | Upregulated | NADPH-dependent FMN reductase |
| | (steroids, squalene etc) | | | | domain containing protein, expressed |
| | not assigned.unknown | LOC_Os05g40010 | 1.1150 | Downregulated | LTPL17 - Protease inhibitor/seed |
| | | | | | storage/LTP family protein precursor, |
| | | | | | expressed |
| | not assigned.unknown | LOC_Os07g43290 | 0.2648 | Downregulated | LTPL56 - Protease inhibitor/seed |
| | | | | | storage/LTP family protein precursor, |
| | | | | | expressed |
| | not assigned.unknown | LOC_Os03g26820 | −0.8372 | Upregulated | LTPL52 - Protease inhibitor/seed |
| | | | | | storage/LTP family protein precursor, |
| | | | | | expressed |
| | misc.protease inhibitor/seed | LOC_Os04g33920 | 1.2606 | Downregulated | LTPL102 - Protease inhibitor/seed |
| | storage/lipid transfer protein | | | | storage/LTP family protein precursor, |
| | (LTP) family protein | | | | expressed |
| | misc.protease inhibitor/seed | LOC_Os07g09970 | 1.4528 | Downregulated | LTPL84 - Protease inhibitor/seed |
| | storage/lipid transfer protein | | | | storage/LTP family protein precursor, |
| | (LTP) family protein | | | | expressed |
| | misc.protease inhibitor/seed | LOC_Os05g06780 | 2.5306 | Downregulated | LTPL104 - Protease inhibitor/seed |
| | storage/lipid transfer protein | | | | storage/LTP family protein precursor, |
| | (LTP) family protein | | | | expressed |
| Amino | amino acid | LOC_Os08g09250 | −2.2837 | Upregulated | glyoxalase family protein, putative, |
| Acid | metabolism.degradation.aspartate | | | | expressed |
| Metabolism | family.threonine | | | | |
| | amino acid | LOC_Os07g09060 | −1.5902 | Upregulated | aldehyde dehydrogenase, putative, |
| | metabolism.degradation. | | | | expressed |
| | branched-chain group.valine | | | | |
| Secondary | secondary | LOC_Os08g38900 | −1.8384 | Upregulated | caffeoyl-CoA O-methyltransferase, |
| Metabolism | metabolism.phenylpropanoids.lignin | | | | putative, expressed |
| | biosynthesis.CCoAOMT | | | | |
| Hormones | hormone | LOC_Os08g41290 | 0.7677 | Downregulated | AIR12, putative, expressed |
| | metabolism.auxin.induced- | | | | |
| | regulated-responsive- | | | | |
| | activated | | | | |
| Stress - | stress.biotic | LOC_Os05g33140 | 0.7055 | Downregulated | CHITS - Chitinase family protein |
| Related | | | | | precursor, expressed |
| Proteins | stress.biotic | LOC_Os07g03710 | 1.0875 | Downregulated | SCP-like extracellular protein, expressed |
| | stress.biotic | LOC_Os09g21210 | −1.7680 | Upregulated | beta-glucan-binding protein 4, putative, |
| | | | | | expressed |
| | stress.biotic | LOC_Os10g11500 | 0.6809 | Downregulated | SCP-like extracellular protein, expressed |
| | stress.biotic | LOC_Os03g46060 | 0.0245 | Downregulated | thaumatin family domain containing |
| | | | | | protein, expressed |
| | stress.biotic | LOC_Os05g15770 | −1.5297 | Upregulated | glycosyl hydrolase, putative, expressed |
| | stress.biotic | LOC_Os05g33130 | −3.4115 | Upregulated | CHIT17 - Chitinase family protein |
| | | | | | precursor, expressed |
| | stress.biotic | LOC_Os03g46070 | 1.1931 | Downregulated | thaumatin, putative, expressed |
| | stress.biotic | LOC_Os10g18820 | 0.4468 | Downregulated | dirigent, putative, expressed |
| | stress.biotic | LOC_Os10g34920 | 0.9595 | Downregulated | secretory protein, putative, expressed |
| | stress.biotic.PR-proteins | LOC_Os07g01660 | 0.9938 | Downregulated | dirigent, putative, expressed |
| | stress.abiotic.heat | LOC_Os04g36750 | 1.6417 | Downregulated | hsp20/alpha crystallin family protein, |
| | | | | | putative, expressed |
| | stress.abiotic.heat | LOC_Os01g62290 | 1.0118 | Downregulated | DnaK family protein, putative, expressed |
| | stress.abiotic.heat | LOC_Os03g02260 | −0.9892 | Upregulated | DnaK family protein, putative, expressed |
| | stress.abiotic.heat | LOC_Os04g01740 | −2.7931 | Upregulated | heat shock protein, putative, expressed |
| | stress.abiotic.heat | LOC_Os03g15960 | 1.5378 | Downregulated | hsp20/alpha crystallin family protein, |
| | | | | | putative, expressed |
| | stress.abiotic.heat | LOC_Os01g04370 | 1.2218 | Downregulated | hsp20/alpha crystallin family protein, |
| | | | | | putative, expressed |
| | stress.abiotic.heat | LOC_Os08g39140 | −2.3938 | Upregulated | heat shock protein, putative, expressed |
| | stress.abiotic.heat | LOC_Os05g38530 | −2.9993 | Upregulated | DnaK family protein, putative, expressed |
| | stress.abiotic.heat | LOC_Os06g50300 | −2.8550 | Upregulated | heat shock protein, putative, expressed |
| | stress.abiotic.cold | LOC_Os08g03520 | 1.6074 | Downregulated | retrotransposon protein putative, Ty1- |
| | | | | | copia subclass, expressed |
| | stress.abiotic.drought/salt | LOC_Os01g13210 | 1.9693 | Downregulated | salt stress root protein RS1, putative, |
| | | | | | expressed |
| | stress.abiotic.unspecified | LOC_Os03g48770 | 1.3813 | Downregulated | Cupin domain containing protein, |
| | | | | | expressed |
| | stress.abiotic.unspecified | LOC_Os01g18170 | 0.1738 | Downregulated | Cupin domain containing protein, |
| | | | | | expressed |
| | stress.abiotic.unspecified | LOC_Os01g14670 | −0.2366 | Upregulated | Cupin domain containing protein, |
| | | | | | expressed |
| | stress.abiotic.unspecified | LOC_Os08g08960 | −0.1897 | Upregulated | Cupin domain containing protein, |
| | | | | | expressed |
| | not assigned.unknown | LOC_Os01g50910 | −0.1233 | Upregulated | late embryogenesis abundant protein, |
| | | | | | group 3, putative, expressed |
| | not assigned.unknown | LOC_Os05g47470 | 1.0238 | Downregulated | VIP1 protein, putative, expressed |
| | not assigned.unknown | LOC_Os05g46480 | 1.0024 | Downregulated | late embryogenesis abundant protein, |
| | | | | | group 3, putative, expressed |
| | not assigned.unknown | LOC_Os11g06720 | 1.7088 | Downregulated | abscisic stress-ripening, putative, |
| | | | | | expressed |
| | not assigned.unknown | LOC_Os11g26750 | 0.2255 | Downregulated | dehydrin, putative, expressed |
| Redox - | redox.thioredoxin | LOC_Os11g09280 | −0.4074 | Upregulated | OsPDIL1-1 protein disulfide isomerase |
| Related | | | | | PDIL1-1, expressed |
| Protein | redox.thioredoxin | LOC_Os07g08840 | 2.2353 | Downregulated | thioredoxin, putative, expressed |
| | redox.ascorbate and | LOC_Os05g02530 | −0.2316 | Upregulated | glutathione S-transferase, N-terminal |
| | glutathione.ascorbate | | | | domain containing protein, expressed |
| | redox.ascorbate and | LOC_Os07g49400 | −0.7335 | Upregulated | OsAPx2 - Cytosolic Ascorbate Peroxidase |
| | glutathione.ascorbate | | | | encoding gene 4,5,6,8, expressed |
| | redox.ascorbate and | LOC_Os03g17690 | −0.8999 | Upregulated | OsAPx1 - Cytosolic Ascorbate Peroxidase |
| | glutathione.ascorbate | | | | encoding gene 1-8, expressed |
| | redox.glutaredoxins | LOC_Os04g42930. | 1.6128 | Downregulated | OsGrx C2.2 - glutaredoxin subgroup I, |
| | | | | | expressed |
| | redox.dismutases and | LOC_Os07g46990 | 2.5119 | Downregulated | copper/zinc superoxide dismutase, |
| | catalases | | | | putative, expressed |
| | redox.dismutases and | LOC_Os08g44770 | 0.3297 | Downregulated | copper/zinc superoxide dismutase, |
| | catalases | | | | putative, expressed |
| | misc.glutathione S | LOC_Os01g55830 | −2.3557 | Upregulated | glutathione S-transferase, putative, |
| | transferases | | | | expressed |
| | misc.peroxidases | LOC_Os09g29490 | −0.1418 | Upregulated | peroxidase precursor, putative, expressed |
| | misc.peroxidases | LOC_Os01g22370 | −0.9751 | Upregulated | peroxidase precursor, putative, expressed |
| | misc.peroxidases | LOC_Os02g14160 | 0.5096 | Downregulated | peroxidase precursor, putative, expressed |
| | misc.peroxidases | LOC_Os04g59150 | −2.0639 | Upregulated | peroxidase precursor, putative, expressed |
| | misc.peroxidases | LOC_Os01g73170 | −1.7416 | Upregulated | peroxidase precursor, putative, expressed |
| | misc.peroxidases | LOC_Os06g35520 | −0.1243 | Upregulated | peroxidase precursor, putative, expressed |
| | misc.peroxidases | LOC_Os03g55410 | −0.4993 | Upregulated | peroxidase precursor, putative, expressed |
| | misc.peroxidases | LOC_Os10g02040 | −0.4560 | Upregulated | peroxidase precursor, putative, expressed |
| | misc.peroxidases | LOC_Os05g04500 | −0.3602 | Upregulated | peroxidase precursor, putative, expressed |
| | misc.peroxidases | LOC_Os07g48020 | −0.2130 | Upregulated | peroxidase precursor, putative, expressed |
| | misc.peroxidases | LOC_Os07g01410 | −1.0294 | Upregulated | peroxidase precursor, putative, expressed |
| | misc.peroxidases | LOC_Os01g22352 | −0.5611 | Upregulated | peroxidase precursor, putative, expressed |
| | misc.peroxidases | LOC_Os07g48030 | 0.2461 | Downregulated | peroxidase precursor, putative, expressed |
| | misc.peroxidases | LOC_Os05g41990 | −1.2460 | Upregulated | peroxidase precursor, putative, expressed |
| Nucleotide | DNA.synthesis/chromatin | LOC_Os06g48750 | −2.7569 | Upregulated | DEAD-box ATP-dependent RNA |
| Metabolism | structure | | | | helicase, putative, expressed (″DEAD″ |
| | | | | | disclosed as SEQ ID NO: 181) |
| | DNA.synthesis/chromatin | LOC_Os05g49860 | 1.5039 | Downregulated | Core histone H2A/H2B/H3/H4 domain |
| | structure.histone | | | | containing protein, putative, expressed |
| Miscellaneous | Biodegradation of | LOC_Os08g09250 | −2.2837 | Upregulated | glyoxalase family protein, putative, |
| Enzymes | Xenobiotics | | | | expressed |
| | misc.beta 1,3 glucan | LOC_Os07g35480 | 1.1377 | Downregulated | glucan endo-1,3-beta-glucosidase |
| | hydrolases.glucan endo-1,3- | | | | precursor, putative, expressed |
| | beta-glucosidase | | | | |
| | misc.O-methyl transferases | LOC_Os11g20160 | −1.8477 | Upregulated | O-methyltransferase, putative, expressed |
| | misc.myrosinases-lectin- | LOC_Os01g24710 | −0.2644 | Upregulated | jacalin-like lectin domain containing |
| | jacalin | | | | protein, expressed |
| | misc.plastocyanin-like | LOC_Os06g46740 | −0.7111 | Upregulated | early nodulin 20 precursor, putative, |
| | | | | | expressed |
| RNA | RNA.processing.ribonucleases | LOC_Os07g33240 | 1.2769 | Downregulated | endoribonuclease, putative, expressed |
| Processing | RNA.regulation of | LOC_Os09g33810 | 0.8809 | Downregulated | ankyrin repeat domain containing protein, |
| | transcription.AtSR | | | | putative, expressed |
| | Transcription Factor family | | | | |
| | RNA.regulation of | LOC_Os10g39300 | −0.3913 | Upregulated | aspartic proteinase nepenthesin, putative, |
| | transcription.unclassified | | | | expressed |
| Protein | protein.synthesis.ribosomal | LOC_Os01g67134 | −2.3733 | Upregulated | ribosomal L18p/L5e family protein, |
| Metabolism, | protein.eukaryotic.60S | | | | putative, expressed |
| Synthesis | subunit.L5 | | | | |
| and | protein.synthesis.ribosomal | LOC_Os02g47140 | −0.7944 | Upregulated | L11 domain containing ribosomal protein, |
| Degradation | protein.eukaryotic.60S | | | | putative, expressed |
| | subunit.L12 | | | | |
| | protein.synthesis.ribosomal | LOC_Os06g48780 | 1.6960 | Downregulated | 60S acidic ribosomal protein, putative, |
| | protein.eukaryotic.60S | | | | expressed |
| | subunit.P3 | | | | |
| | protein.synthesis.initiation | LOC_Os03g55150 | 1.2295 | Downregulated | eukaryotic translation initiation factor SA, |
| | | | | | putative, expressed |
| | protein.synthesis.elongation | LOC_Os03g08020 | −2.1295 | Upregulated | elongation factor Tu, putative, expressed |
| | protein.synthesis.elongation | LOC_Os03g08050 | −2.1295 | Upregulated | elongation factor Tu, putative, expressed |
| | protein.synthesis.elongation | LOC_Os03g08010 | −2.1295 | Upregulated | elongation factor Tu, putative, expressed |
| | protein.degradation.cysteine | LOC_Os05g41460 | 0.2691 | Downregulated | cysteine proteinase inhibitor precursor |
| | protease | | | | protein, putative, expressed |
| | protein.degradation.cysteine | LOC_Os04g57440 | 0.2596 | Downregulated | oryzain beta chain precursor, putative, |
| | protease | | | | expressed |
| | protein.degradation.cysteine | LOC_Os04g55650 | −0.0267 | Upregulated | oryzain alpha chain precursor, putative, |
| | protease | | | | expressed |
| | protein.degradation.aspartate | LOC_Os10g39300 | −0.3913 | Upregulated | aspartic proteinase nepenthesin, putative, |
| | protease | | | | expressed |
| | protein.degradation.serine | LOC_Os03g41419 | −0.1811 | Upregulated | seipin domain containing protein, |
| | protease | | | | putative, expressed |
| | protein.degradation.ubiquitin | LOC_Os09g25320 | −0.2443 | Upregulated | ubiquitin family protein, putative, |
| | ubiquitin | | | | expressed |
| | protein.degradation.ubiquitin | LOC_Os09g39500 | −0.3355 | Upregulated | ubiquitin fusion protein, putative, |
| | ubiquitin | | | | expressed |
| | protein.folding | LOC_Os08g25090 | −0.0902 | Upregulated | co-chaperone GrpE protein, putative, |
| | | | | | expressed |
| | protein.folding | LOC_Os07g44740 | 1.7354 | Downregulated | chaperonin, putative, expressed |
| | protein.folding | LOC_Os06g09688 | 0.8771 | Downregulated | chaperonin, putative, expressed |
| | protein.folding | LOC_Os10g32550 | −1.7110 | Upregulated | T-complex protein, putative, expressed |
| | not assigned.unknown | LOC_Os01g11010 | 0.3982 | Downregulated | peptide-N4-asparagine amidase A, |
| | | | | | putative, expressed |
| | not assigned.unknown | LOC_Os01g03360 | 1.9320 | Downregulated | BBTI5 - Bowman-Birk type bran trypsin |
| | | | | | inhibitor precursor, expressed |
| Signaling | signalling.receptor | LOC_Os04g56430 | 0.7112 | Downregulated | cysteine-rich receptor-like protein kinase, |
| Proteins | kinases.misc | | | | putative, expressed |
| | signalling.calcium | LOC_Os01g04330 | 1.4649 | Downregulated | OsCML16 - Calmodulin-related calcium |
| | | | | | sensor protein, expressed |
| | signalling.calcium | LOC_Os03g20370 | 2.4802 | Downregulated | OsCam1-1 - Calmodulin, expressed |
| | signalling.MAP kinases | LOC_Os08g01310 | −0.9161 | Upregulated | phospholipase C, putative, expressed |
| | signalling.14-3-3 proteins | LOC_Os08g33370 | −1.7188 | Upregulated | 14-3-3 protein, putative, expressed |
| | signalling.14-3-3 proteins | LOC_Os04g38870 | −2.5741 | Upregulated | 14-3-3 protein, putative, expressed |
| | not assigned.unknown | LOC_Os04g25650 | 0.6821 | Downregulated | cysteine-rich receptor-like protein kinase, |
| | | | | | putative, expressed |
| Developmental - | development.late | LOC_Os01g12580 | 0.7772 | Downregulated | late embryogenesis abundant protein, |
| Related | embryogenesis abundant | | | | putative, expressed |
| Proteins | development.late | LOC_Os06g23350 | 0.6569 | Downregulated | late embryogenesis abundant protein D- |
| | embryogenesis abundant | | | | 34, putative, expressed |
| | development.unspecified | LOC_Os06g13030 | −1.6951 | Upregulated | OsLIM - LIM domain protein, putative |
| | | | | | actin-binding protein and transcription |
| | | | | | factor, expressed |
| | not assigned.unknown | LOC_Os05g28210 | 1.0307 | Downregulated | small hydrophilic plant seed protein, |
| | | | | | putative, expressed |
| | not assigned.unknown | LOC_Os03g07180 | −1.3908 | Upregulated | embryonic protein DC-8, putative, |
| | | | | | expressed |
| Transport | transport and v-ATPases | LOC_Os04g51270 | 1.5409 | Downregulated | vacuolar ATPase G subunit, putative, |
| Proteins | | | | | expressed |
| | transport.misc | LOC_Os05g35460 | 1.3513 | Downregulated | patellin protein, putative, expressed |
| Unassigned | metal handling.binding, | LOC_Os08g10480 | 1.2253 | Downregulated | heavy metal-associated domain containing |
| Classes | chelation and storage | | | | protein, expressed |
| | not assigned.unknown | LOC_Os03g15920 | −0.6574 | Upregulated | expressed protein |
| | not assigned.unknown | LOC_Os03g15910 | −0.6574 | Upregulated | membrane protein, putative, expressed |
| | not assigned.unknown | LOC_Os10g14050 | 0.1468 | Downregulated | expressed protein |
| | not assigned.unknown | LOC_Os06g12580 | −0.0268 | Upregulated | pro-resilin precursor, putative, expressed |
| | not assigned.unknown | LOC_Os08g01370 | 0.3251 | Downregulated | expressed protein |
| | not assigned.unknown | LOC_Os10g36180 | 0.0225 | Downregulated | expressed protein |

[0310] Proline Metabolism: A New Paradigm in Drought Tolerant Rice Crops.

[0311] Proline is a highly water soluble amino acid, which exists as a zwitterion and is known to accumulate to increase cellular osmolarity in plants experiencing dehydration stress and to play an important role in redox buffering and in transferring energy as per cellular demands (Verslues and Sharma, 2010). Such properties of proline depend not only on proline itself but on its metabolic cycle as well. Glutamate is the source of proline synthesis through pyrroline 5-carboxylate synthetase (P5CS) and pyrroline-5-carboxylate reductase (P5CR) and is also the product of proline degradation through proline dehydrogenase and pyrroline-5-carboxylate dehydrogenase. Mutant and transgenic approaches to functionally validate the function of these genes under salt and cold stress have been undertaken, however there is limited understanding of the role of proline in crops under drought. “The more the better” is the popular strategy but higher accumulation of proline has never shown any direct correlation to yield under stress. Other functions for proline depend on spatial and temporal control of proline metabolism to act as redox buffer and meet the plants' needs for energy (Szabados and Savouré, 2010; Verslues and Sharma, 2010).

[0312] Under drought, both parents had significantly higher proline content in the flag leaf than the 481-B (FIGS. 32D-32F). The proline synthesis genes were more up-regulated in the flag leaf of the parents than in that of the 481-B (FIGS. 33A-33B). The roots on the other hand had much higher proline content in the 481-B than in the parents (FIG. 33E). However, the roots of the NILs showed a significant down-regulation of the proline synthesis genes, whereas they were up-regulated in the parents (FIGS. 33C-D). These results indicated that during stress proline is translocated from the leaf to the roots in the 481-B. Colorimetric measurement of the proline content during stress revealed much higher levels of proline in the stem of the 481-B than in that of the parental plants (FIG. 33E). Proline supply from the shoot and its catabolism in the root was shown to be essential for continued growth at low water potential in Arabidopsis (Sharma et al., 2011). Earlier, maize root tips were shown to accumulate high levels of proline during stress due to proline translocation and not due to de novo synthesis (Verslues and Sharp, 1999). Such observations indicate that stress-induced tissue-specific differences in proline metabolism and accumulation are more important than previously thought. The roots of the 481-B thus seem better equipped to counter stress and perform its critical functions towards drought tolerance.

[0313] Whether or not proline accumulation is a stress indicator or part of an adaptive response has long been debated. Earlier work correlated proline to stress and thus higher proline accumulations indicated more stress (Stewart and Hanson, 1980). However, recently higher proline content has been associated with better drought and salt tolerance (Ben Hassine et al., 2008; Evers et al., 2010; Kant et al., 2006). Reverse genetics and other molecular approaches have established that stress induced proline accumulation is useful; however they have also provided further insights into different functions of proline with respect to maintenance of homeostasis (Kishor and Sreenivasulu, 2013). Its role in osmotic adjustment have been shown in the drought stress, where decrease in soil water potential lead to higher levels of proline in unvacuolated cells of the root tip, mainly in the chloroplast stroma and the cytoplasm (Verslues and Sharp, 1999; Bussis and Heineke, 1998). Proline is proposed to stabilize cellular structures and membranes through hydrophilic interactions and hydrogen bonding and to maintain turgor pressure and water content (Verslues and Sharma, 2010). In the case of the 481-B drought-induced lateral root growth depends on the combined capacity of proline to act as a redox buffer as a source of energy and as an osmoticum to maintain due cellular homeostasis and tissue functionality.

[0314] While the invention has been described with reference to various and preferred embodiments, it should be understood by those skilled in the art that various changes may be made and equivalents may be substituted for elements thereof without departing from the essential scope of the invention. In addition, many modifications may be made to adapt a particular situation or material to the teachings of the invention without departing from the essential scope thereof. For example in addition to being applicable to rice, the materials and methods disclosed herein may also be applied to other cereal grass, including but not limited to corn, wheat, barley, sorghum, millet, oats, and rye

[0315] Therefore, it is intended that the invention not be limited to the particular embodiment disclosed herein contemplated for carrying out this invention, but that the invention will include all embodiments falling within the scope of the claims.

What is claimed is:

1. A method of improving lateral root growth and water uptake in a cereal grass comprising:
a) crossing a crossing plant of one variety of cereal grass having chromosomal DNA that comprises a nucleic acid comprising qDTY_{12.1}, or a yield-improving part thereof, with a recipient plant of a distinct variety of cereal grass having chromosomal DNA that does not include a nucleic acid comprising qDTY_{12.1}, or a yield-improving part thereof; and
b) selecting one or more progeny plants having chromosomal DNA that comprises a nucleic acid comprising qDTY_{12.1}, or a yield-improving part thereof,
wherein qDTY_{12.1}, or a yield-improving part thereof, is detected in the crossing plant, recipient plant, or one or more progeny plants by analyzing genomic DNA from the crossing plant, the recipient plant, or one or more progeny plant, or germplasm, pollen, or seed thereof, for the presence of at least one molecular marker linked to qDTY_{12.1}, or a yield-improving part thereof, wherein the at least one molecular marker is selected from the group consisting of: RM28048; RM28076; RM28089; RM28099; RM28130; RM511; RM1261; RM28166; RM28199; and Indel-8, and wherein a selected one or more progeny plant having DNA that comprises a nucleic acid comprising qDTY_{12.1}, or a yield-improving part thereof, has improved lateral root growth and water uptake.

2. The method of claim 1, further comprising the steps:
a) backcrossing the one or more selected progeny plants to produce backcross progeny plants; and
b) selecting one or more backcross progeny plants having chromosomal DNA that comprises a nucleic acid comprising qDTY_{12.1}, or a yield-improving part thereof, wherein qDTY_{12.1}, or a yield-improving part thereof, is detected in the one or more backcross progeny plants by analyzing genomic DNA from the one or more backcross progeny plants, or germplasm, pollen, or seed thereof, for the presence of at least one molecular marker linked to qDTY_{12.1}, or a yield-improving part thereof, wherein the at least one molecular marker is selected from the group consisting of: RM28048; RM28076; RM28089; RM28099; RM28130; RM511; RM1261; RM28166; RM28199; and Indel-8.

3. The method of claim 2, wherein steps a) and b) are repeated one or more times to produce third or higher backcross progeny plants having chromosomal DNA that comprises a nucleic acid comprising qDTY_{12.1}, or a yield-improving part thereof, wherein qDTY_{12.1}, or a yield-improving part thereof, is detected in the one or more backcross progeny plants by analyzing genomic DNA from the one or more backcross progeny plants, or germplasm, pollen, or seed thereof, for the presence of at least one molecular marker linked to qDTY_{12.1}, or a yield-improving part thereof, wherein the at least one molecular marker is selected from the group consisting of: RM28048; RM28076; RM28089; RM28099; RM28130; RM511; RM1261; RM28166; RM28199; and Indel-8.

4. The method of claim 3, wherein physiological and morphological characteristics of the recipient plant, other than those of lateral root growth and water uptake, are retained.

5. The method of claim 1, wherein at least one of the crossing plant and the recipient plant has chromosomal DNA comprising a nucleic acid having at least 70% sequence identity to Ulp1.

6. The method of claim 1, wherein the selected one or more progeny plants is further selected for having increased lateral root growth relative to a control plant.

7. The method of claim 1, wherein the selected one or more progeny plants is further selected for having increased lateral root growth relative to a control plant in both well watered and drought conditions.

8. The method of claim 1, wherein the selected one or more progeny plants is further selected for having improved yield under drought conditions relative to a control plant.

9. The method of claim 1, wherein the selected one or more progeny plants is further selected for having at least one trait associated with improved yield under drought conditions selected from the group consisting of: increased sucrose content in flag leaf relative to a control plant; increased sucrose content in spikelets relative to a control plant; increased starch content in spikelets relative to a control plant; and increased carbon reserves in roots relative to a control plant.

10. The method of claim 1, wherein the cereal grass is selected from the group consisting of: rice; corn;
wheat; barley; sorghum; millet; oats; and rye.

11. The method of claim 1, wherein the cereal grass is rice.

12. The method of claim 1, wherein the cereal grass is corn.

13. The method of claim 1, wherein the crossing plant is a rice plant selected from the group consisting of: WayRarem; IR79971-B-102-B; and IR74371-46-1-1.

14. The method of claim 1, wherein the recipient plant is a rice plant selected from the group consisting of: Vandana; Kalinga 3; Anjali; IR64; Swarna; Sambha Mahsuri; MTU1010, Lalat; Naveen; Sabitri; BR11; BR29; BR28; TDK1; TDK 9; and Chirang.

15. The method of claim 1, wherein the yield improving part of qDTY_{12.1} comprises one or more nucleic acids sharing at least 70% identity with one or more nucleic acids of the group of nucleic acids consisting of: SEQ ID NO: 2 (OsNAM_{12.1}); SEQ ID NO: 3 (OsGPDP_{12.1}); SEQ ID NO: 4 (OsGPDP_{12.1}); SEQ ID NO: 5 (OsGPDP_{12.1}); SEQ ID NO: 6 (OsSTPK_{12.1}); SEQ ID NO: 7 (OsSTPK_{12.1}); SEQ ID NO: 8 (OsSTPK_{12.1}); SEQ ID NO: 9 (OsPOle_{12.1}); SEQ ID NO: 10 (OsMtN3_{12.1}); SEQ ID NO: 11 (OsWAK_{12.1}); SEQ ID NO: 12 (OsCesA_{12.1}); SEQ ID NO: 13 (OsGDP_{12.1}); SEQ ID NO: 14 (OsARF_{12.1}); SEQ ID NO: 15 (OsARF_{12.1}); SEQ ID NO: 16 (OsARF_{12.1}); SEQ ID NO: 17 (OsARF_{12.1}); SEQ ID NO: 18 (OsARF_{12.1}); SEQ ID NO: 20 (OsAmh_{12.1}); and SEQ ID NO: 21 (OsAmh_{12.1}).

16. The method of claim 1, wherein the yield improving part of qDTY_{12.1} comprises a nucleic acid sharing an identity with SEQ ID NO: 2 (OsNAM_{12.1}) selected from the group consisting of: at least 70% identity; at least 75% identity; at least 80% identity; at least 85% identity; at least 90% identity; at least 95% identity; at least 96% identity; at least 97% identity; at least 98% identity; at least 99% identity; and 100% identity.

17. The method of claim 1, wherein the crossing plant, in addition to having chromosomal DNA that comprises a nucleic acid comprising qDTY12.1, or a yield-improving part thereof, also comprises a nucleic acid comprising qDTY_{2.3}.

18. The method of claim 1, wherein the recipient plant has chromosomal DNA that comprises a nucleic acid comprising qDTY_{2.3}.

19. A method of improving lateral root growth and water uptake in a cereal grass comprising:
a) crossing a crossing plant of one variety of cereal grass having chromosomal DNA that comprises a nucleic acid sharing an identity with SEQ ID NO: 2 (OsNAM_{12.1}) selected from the group consisting of: at least 70% identity; at least 75% identity; at least 80% identity; at least 85% identity; at least 90% identity; at least 95% identity; at least 96% identity; at least 97% identity; at least 98% identity; at least 99% identity; and 100% identity, with a recipient plant of a distinct variety of cereal grass having chromosomal DNA that does not include a nucleic acid sharing at least 70% identity with SEQ ID NO: 2 (OsNAM_{12.1}); and
b) selecting one or more progeny plants having chromosomal DNA that comprises a nucleic acid sharing an identity with SEQ ID NO: 2 (OsNAM_{12.}) selected from the group consisting of: at least 70% identity; at least 75% identity; at least 80% identity; at least 85% identity; at least 90% identity; at least 95% identity; at least 96% identity; at least 97% identity; at least 98% identity; at least 99% identity; and 100% identity.

20. The method of claim 19, wherein the nucleic acid sharing an identity with SEQ ID NO: 2 (OsNAM_{12.}) selected from the group consisting of: at least 70% identity; at least 75% identity; at least 80% identity; at least 85% identity; at least 90% identity; at least 95% identity; at least 96% identity; at least 97% identity; at least 98% identity; at least 99% identity; and 100% identity is detected by RT-PCR.

21. The method of claim 19, further comprising the steps:
c) backcrossing the one or more selected progeny plants produce backcross progeny plants; and
d) selecting one or more backcross progeny plants having chromosomal DNA that comprises a nucleic acid sharing an identity with SEQ ID NO: 2 (OsNAM_{12.}) selected from the group consisting of: at least 70% identity; at least 75% identity; at least 80% identity; at least 85% identity; at least 90% identity; at least 95% identity; at least 96% identity; at least 97% identity; at least 98% identity; at least 99% identity; and 100% identity.

22. The method of claim 21, wherein steps c) and d) are repeated one or more times to produce third or higher backcross progeny plants having chromosomal DNA that comprises a nucleic acid sharing an identity with SEQ ID NO: 2 (OsNAM_{12.}) selected from the group consisting of: at least 70% identity; at least 75% identity; at least 80% identity; at least 85% identity; at least 90% identity; at least 95% identity; at least 96% identity; at least 97% identity; at least 98% identity; at least 99% identity; and 100% identity.

23. The method of claim 19, wherein at least one of the crossing plant and the recipient plant has chromosomal DNA comprising a nucleic acid having at least 70% sequence identity to Ulp1, wherein Ulp1 encodes a functional deSUMOylating protease capable of deSUMOylating a polypeptide encoded by the nucleic acid sharing an identity with SEQ ID NO: 2 (OsNAM_{12.}) selected from the group consisting of: at least 70% identity; at least 75% identity; at least 80% identity; at least 85% identity; at least 90% identity; at least 95% identity; at least 96% identity; at least 97% identity; at least 98% identity; at least 99% identity; and 100% identity.

24. The method of claim 19, wherein the selected one or more progeny plants is further selected for having increased lateral root growth relative to a control plant.

25. The method of claim 19, wherein the selected one or more progeny plants is further selected for having increased lateral root growth relative to a control plant in both well watered and drought conditions.

26. The method of claim 19, wherein the selected one or more progeny plants is further selected for having improved yield under drought conditions relative to a control plant.

27. The method of claim 19, wherein the selected one or more progeny plants is further selected for having at least one trait associated with improved yield under drought conditions selected from the group consisting of: increased sucrose content in flag leaf relative to a control plant; increased sucrose content in spikelets relative to a control plant; increased starch content in spikelets relative to a control plant; and increased carbon reserves in roots relative to a control plant

28. The method of claim 19, wherein the cereal grass is selected from the group consisting of: rice; corn; wheat; barley; sorghum; millet; oats; and rye.

29. The method of claim 19, wherein the cereal grass is rice.

30. The method of claim 19, wherein the cereal grass is corn.

31. The method of claim 19, wherein the crossing plant is a rice plant selected from the group consisting of: WayRarem; IR79971-B-102-B; and IR74371-46-1-1.

32. The method of claim 19, wherein the recipient plant is a rice plant selected from the group consisting of: Vandana; Kalinga 3; Anjali; IR64; Swarna; Sambha Mahsuri; MTU1010, Lalat; Naveen; Sabitri; BR11; BR29; BR28; TDK1; TDK 9; and Chirang.

33. The method of claim 19, wherein the crossing plant has chromosomal DNA that comprises one or more nucleic acids sharing an identity selected from the group consisting of: at least 70% identity; at least 75% identity; at least 80% identity; at least 85% identity; at least 90% identity; at least 95% identity; at least 96% identity; at least 97% identity; at least 98% identity; at least 99% identity; and 100% identity, with one or more nucleic acids of the group of nucleic acids consisting of: SEQ ID NO: 3 (OsGPDP_{12.1}); SEQ ID NO: 4 (OsGPDP_{12.1}); SEQ ID NO: 5 (OsGPDP_{12.1}); SEQ ID NO: 6 (OsSTPK_{12.1}); SEQ ID NO: 7 (OsSTPK_{12.1}); SEQ ID NO: 8 (OsSTPK_{12.1}); SEQ ID NO: 9 (OsPOle_{12.1}); SEQ ID NO: 10 (OsMtN3_{12.1}); SEQ ID NO: 11 (OsWAK_{12.1}); SEQ ID NO: 12 (OsCesA_{12.1}); SEQ ID NO: 13 (OsGDP_{12.1}); SEQ ID NO: 14 (OsARF_{12.1}); SEQ ID NO: 15 (OsARF_{12.1}); SEQ ID NO: 16 (OsARF_{12.1}); SEQ ID NO: 17 (OsARF_{12.1}); SEQ ID NO: 18 (OsARF_{12.1}); SEQ ID NO: 20 (OsAmh_{12.1}); and SEQ ID NO: 21 (OsAmh_{12.1}).

34. The method of claim 19, wherein the crossing plant has chromosomal DNA that comprises a nucleic acid comprising qDTY_{2.3} and the nucleic acid comprising qDTY_{2.3} is selected for in the recipient plant.

35. The method of claim 19, wherein the recipient plant has chromosomal DNA that comprises a nucleic acid comprising qDTY_{2.3}.

36. A method for selecting a cereal grass plant having improved lateral root growth and water uptake relative to a control cereal grass plant, comprising:
a) inducing expression or increasing expression in a cereal grass plant a nucleic acid comprising qDTY_{12.1}, or a yield-improving part thereof, wherein the induced or increased expression of the nucleic acid comprising qDTY_{12.1}, or a yield-improving part thereof, is obtained by transforming and expressing in the cereal grass plant the nucleic acid comprising qDTY_{12.1}, or a yield-improving part thereof; and
b) selecting a cereal grass plant having improved lateral root growth and water uptake relative to a control cereal grass plant, wherein the cereal grass plant having improved lateral root growth and water uptake relative to a control cereal grass plant is selected by analyzing genomic DNA from the cereal grass plant, or germplasm, pollen, or seed thereof, and detecting therein at least one molecular marker linked to qDTY12.1, or a yield-improving part thereof, wherein the at least one molecular marker is selected from the group consisting of: RM28048; RM28076; RM28089; RM28099; RM28130; RM511; RM1261; RM28166; RM28199; and Indel-8.

37. The method of claim 36, wherein the cereal grass plant has chromosomal DNAcomprising a nucleic acid having at least 70% sequence identity to Ulp1.

38. The method of claim 36, wherein the selected cereal grass plant is further selected for having improved yield under drought conditions compared to a control cereal grass plant.

39. The method of claim 36, wherein the induced or increased expression of the nucleic acid comprising qDTY12.1, or a yield-improving part thereof, is a result of introducing and expressing the nucleic acid comprising qDTY_{12.1}, or a yield-improving part thereof, in the cereal grass plant under control of at least one promoter functional in plants.

40. The method of claim 36, wherein the at least one promoter and the nucleic acid comprising qDTY_{12.1}, or yield improving part thereof, are operably linked.

41. The method of claim 36, wherein the cereal grass plant is selected from the group consisting of: rice; corn; wheat; barley; sorghum; millet; oats; and rye.

42. The method of claim 36, wherein the yield-improving part of qDTY_{12.1} comprises one or more nucleic acids sharing an identity selected from the group consisting of: at least 70% identity; at least 75% identity; at least 80% identity; at least 85% identity; at least 90% identity; at least 95% identity; at least 96% identity; at least 97% identity; at least 98% identity; at least 99% identity; and 100% identity, with one or more nucleic acids of the group of nucleic acids consisting of: SEQ ID NO: 2 (OsNAM_{12.1}); SEQ ID NO: 3 (OsGPDP_{12.1}); SEQ ID NO: 4 (OsGPDP_{12.1}); SEQ ID NO: 5 (OsGPDP_{12.1}); SEQ ID NO: 6 (OsSTPK_{12.1}); SEQ ID NO: 7 (OsSTPK_{12.1}); SEQ ID NO: 8 (OsSTPK_{12.1}); SEQ ID NO: 9 (OsPOle_{12.1}); SEQ ID NO: 10 (OsMtN3_{12.1}); SEQ ID NO: 11 (OsWAK_{12.1}); SEQ ID NO: 12 (OsCesA_{12.1}); SEQ ID NO: 13 (OsGDP_{12.1}); SEQ ID NO: 14 (OsARF_{12.1}); SEQ ID NO: 15 (OsARF_{12.1}); SEQ ID NO: 16 (OsARF_{12.1}); SEQ ID NO: 17 (OsARF_{12.1}); SEQ ID NO: 18 (OsARF_{12.1}); SEQ ID NO: 20 (OsAmh₁₂); and SEQ ID NO: 21 (OsAmh_{12.1}).

43. The method of claim 36, wherein the yield improving part of qDTY_{12.1} comprises a nucleic acid sharing an identity with SEQ ID NO: 2 (OsNAM_{12.1}) selected from the group consisting of: at least 70% identity; at least 75% identity; at least 80% identity; at least 85% identity; at least 90% identity; at least 95% identity; at least 96% identity; at least 97% identity; at least 98% identity; at least 99% identity; and 100% identity.

44. A method for generating a cereal grass plant having improved lateral root growth and water uptake relative to a control cereal grass plant comprising:
a) transforming a cereal grass plant cell, cereal grass plant, or part thereof with a construct comprising:
(1) a nucleic acid encoding a polypeptide having a sequence identity selected from the group consisting of: at least 70% identity; at least 75% identity; at least 80% identity; at least 85% identity; at least 90% identity; at least 95% identity; at least 96% identity; at least 97% identity; at least 98% identity; at least 99% identity; and 100% identity to nucleic acid sequence SEQ ID NO: 2 (OsNAM_{12.1});
(2) a promoter operably linked to the nucleic acid; and
(3) a transcription termination sequence; and
b) expressing the construct in a cereal grass plant cell, cereal grass plant, or part thereof, thereby generating a cereal grass plant having improved lateral root growth and water uptake relative to a control cereal grass plant.

45. The method of claim 44, wherein the construct further comprises one or more nucleic acids sharing at an identity selected from the group consisting of: at least 70% identity; at least 75% identity; at least 80% identity; at least 85% identity; at least 90% identity; at least 95% identity; at least 96% identity; at least 97% identity; at least 98% identity; at least 99% identity; and 100% identity, with one or more nucleic acids of the group of nucleic acids consisting of: SEQ ID NO: 3 (OsGPDP_{12.1}); SEQ ID NO: 4 (OsGPDP_{12.1}); SEQ ID NO: 5 (OsGPDP_{12.1}); SEQ ID NO: 6 (OsSTPK_{12.1}); SEQ ID NO: 7 (OsSTPK_{12.1}); SEQ ID NO: 8 (OsSTPK_{12.1}); SEQ ID NO: 9 (OsPOle_{12.1}); SEQ ID NO: 10 (OsMtN3_{12.1}); SEQ ID NO: 11 (OsWAK_{12.1}); SEQ ID NO: 12 (OsCesA_{12.1}); SEQ ID NO: 13 (OsGDP_{12.1}); SEQ ID NO: 14 (OsARF_{12.1}); SEQ ID NO: 15 (OsARF_{12.1}); SEQ ID NO: 16 (OsARF_{12.1}); SEQ ID NO: 17 (OsARF_{12.1}); SEQ ID NO: 18 (OsARF_{12.1}); SEQ ID NO: 20 (OsAmh_{12.1}); and SEQ ID NO: 21 (OsAmh_{12.1}).

46. The method of the claim 44, wherein the construct further comprises a nucleic acid having at least 70% sequence identity to Ulp1, wherein the nucleic acid encoding a deSUMOylating protease encodes a functional deSUMOylating protease capable of deSUMOylating a polypeptide encoded by the nucleic acid sharing an identity with SEQ ID NO: 2 (OsNAM_{12.}) selected from the group consisting of: at least 70% identity; at least 75% identity; at least 80% identity; at least 85% identity; at least 90% identity; at least 95% identity; at least 96% identity; at least 97% identity; at least 98% identity; at least 99% identity; and 100% identity.

47. The method of the claim 44, further comprising a step of selecting for a cereal grass plant having improved lateral root growth relative to a control cereal grass plant.

48. The method of claim 44, further comprising a step of selecting for a cereal grass plant having improved yield under drought conditions relative to a control cereal grass plant.

49. The method of claim 44, further comprising a step of selecting for a cereal grass plant having a phenotype comprising one or more characteristics selected from the group consisting of: increased sucrose content in flag leaf relative to a control plant; increased sucrose content in spikelets relative to a control plant; increased starch content in spikelets relative to a control plant; and increased carbon reserves in roots relative to a control plant.

50. The method of claim 44, wherein the cereal grass plant cell, cereal grass plant, or part thereof is selected from the group consisting of: rice; corn; wheat; barley; sorghum; millet; oats; and rye.

51. A method for the production of a transgenic cereal grass plant having improved lateral root growth and water uptake relative to a control cereal grass plant comprising:
a) transforming and expressing in a cereal grass plant cell at least one nucleic acid having at a sequence identity selected from the group consisting of: at least 70% identity; at least 75% identity; at least 80% identity; at least 85% identity; at least 90% identity; at least 95% identity; at least 96% identity; at least 97% identity; at least 98% identity; at least 99% identity; and 100% identity with one or more nucleic acids of the group of nucleic acids consisting of: SEQ ID NO: 2 (OsNAM_{12.1}); SEQ ID NO: 3 (OsGPDP_{12.1}); SEQ ID NO: 4 (OsGPDP_{12.1}); SEQ ID NO: 5 (OsGPDP_{12.1}); SEQ ID NO: 6 (OsSTPK_{12.1}); SEQ ID NO: 7 (OsSTPK_{12.1}); SEQ ID NO: 8 (OsSTPK_{12.1}); SEQ ID NO: 9 (OsPOle_{12.1}); SEQ ID NO: 10 (OsMtN3_{12.1}); SEQ ID NO: 11 (OsWAK_{12.1}); SEQ ID NO: 12 (OsCesA_{12.1}); SEQ ID NO: 13 (OsGDP_{12.1}); SEQ ID NO: 14 (OsARF_{12.1}); SEQ ID NO: 15 (OsARF_{12.1}); SEQ ID NO: 16 (OsARF_{12.1}); SEQ ID NO: 17 (OsARF_{12.1}); SEQ ID NO: 18 (OsARF_{12.1}); SEQ ID NO: 20 (OsAmh_{12.1}); and SEQ ID NO: 21 (OsAmh_{12.1}); and
b) cultivating the cereal grass plant cell under conditions promoting plant growth and development, and obtaining transformed plants expressing one or more of OsNAM_{12.1}, OsGPDP_{12.1}, OsSTPK_{12.1}, OsPOle_{12.1}, OsMtN3_{12.1}, OsWAK_{12.1}, OsCesA_{12.1}, OsGDP_{12.1}, OsARF_{12.1}, and OsAmh_{12.1}.

52. The method of claim 51, further comprising transforming and expressing in the cereal grass plant cell a nucleic acid having at least 70% sequence identity to Ulp1, wherein Ulp1 encodes a functional deSUMOylating protease capable of deSUMOylating a polypeptide encoded by the nucleic acid having at least 70% sequence identity with SEQ ID NO: 2 (OsNAM_{12.1}).

53. The method of claim 51, further comprising a step of selecting for a cereal grass plant having improved lateral root growth relative to a control cereal grass plant.

54. The method of claim 51, further comprising a step of selecting for a cereal grass plant having improved yield under drought conditions relative to a control cereal grass plant.

55. The method of claim 51, further comprising a step of selecting for a cereal grass plant having a phenotype comprising one or more characteristics selected from the group consisting of: increased sucrose content in flag leaf relative to a control plant; increased sucrose content in spikelets relative to a control plant; increased starch content in spikelets relative to a control plant; and increased carbon reserves in roots relative to a control plant.

56. A transgenic plant cell comprising:
a) at least one promoter that is functional in plants; and
b) at least one nucleic acid having a sequence identity selected from the group consisting of: at least 70% identity; at least 75% identity; at least 80% identity; at least 85% identity; at least 90% identity; at least 95% identity; at least 96% identity; at least 97% identity; at least 98% identity; at least 99% identity; and 100% identity with one or more nucleic acids of the group of nucleic acids consisting of: SEQ ID NO: 2 (OsNAM_{12.1}); SEQ ID NO: 3 (OsGPDP_{12.1}); SEQ ID NO: 4 (OsGPDP_{12.1}); SEQ ID NO: 5 (OsGPDP_{12.1}); SEQ ID NO: 6 (OsSTPK_{12.1}); SEQ ID NO: 7 (OsSTPK_{12.1}); SEQ ID NO: 8 (OsSTPK_{12.1}); SEQ ID NO: 9 (OsPOle_{12.1}); SEQ ID NO: 10 (OsMtN3_{12.1}); SEQ ID NO: 11 (OsWAK_{12.1}); SEQ ID NO: 12 (OsCesA_{12.1}); SEQ ID NO: 13 (OsGDP_{12.1}); SEQ ID NO: 14 (OsARF_{12.1}); SEQ ID NO: 15 (OsARF_{12.1}); SEQ ID NO: 16 (OsARF_{12.1}); SEQ ID NO: 17 (OsARF_{12.1}); SEQ ID NO: 18 (OsARF_{12.1}); SEQ ID NO: 20 (OsAmh_{12.1}); and SEQ ID NO: 21 (OsAmh_{12.1}), wherein the promoter and polynucleotide are operably linked and incorporated into the plant cell chromosomal DNA.

57. The transgenic plant cell of claim 56, further comprising a nucleic acid having at least 70% sequence identity to Ulp1, wherein Ulp1 encodes a functional deSUMOylating proteas capable of deSUMOylating a polypeptide encoded by the nucleic acid having at least 70% sequence identity with SEQ ID NO: 2 (OsNAM_{12.1}).

58. The transgenic plant cell of claim 56, wherein the type of plant cell is selected from the group consisting of: rice plant cell; corn plant cell; wheat plant cell; barley plant cell; sorghum plant cell; millet plant cell; oats plant cell; and rye plant cell.

59. The transgenic plant cell of claim 56, wherein the plant cell is homozygous for the at least one nucleic acids.

60. A transgenic plant comprising a plurality of transgenic plant cells of claim 56.

61. A transgenic plant comprising:
a) at least one promoter that is functional in plants; and
b) at least one nucleic acid having a sequence identity selected from the group consisting of: at least 70% identity; at least 75% identity; at least 80% identity; at least 85% identity; at least 90% identity; at least 95% identity; at least 96% identity; at least 97% identity; at least 98% identity; at least 99% identity; and 100% identity with one or more nucleic acids of the group of nucleic acids consisting of: SEQ ID NO: 2 (OsNAM_{12.1}); SEQ ID NO: 3 (OsGPDP_{12.1}); SEQ ID NO: 4 (OsGPDP_{12.1}); SEQ ID NO: 5 (OsGPDP_{12.1}); SEQ ID NO: 6 (OsSTPK_{12.1}); SEQ ID NO: 7 (OsSTPK_{12.1}); SEQ ID NO: 8 (OsSTPK_{12.1}); SEQ ID NO: 9 (OsPOle_{12.1}); SEQ ID NO: 10 (OsMtN3_{12.1}); SEQ ID NO: 11 (OsWAK_{12.1}); SEQ ID NO: 12 (OsCesA_{12.1}); SEQ ID NO: 13 (OsGDP_{12.1}); SEQ ID NO: 14 (OsARF_{12.1}); SEQ ID NO: 15 (OsARF_{12.1}); SEQ ID NO: 16 (OsARF_{12.1}); SEQ ID NO: 17 (OsARF_{12.1}); SEQ ID NO: 18 (OsARF_{12.1}); SEQ ID NO: 20 (OsAmh_{12.1}); and SEQ ID NO: 21 (OsAmh_{12.1}),
wherein the promoter and polynucleotide are operably linked and incorporated into the plant cell chromosomal DNA.

62. The transgenic plant of claim 61, wherein the plant is selected from the group consisting of: rice; corn; wheat; barley; sorghum; millet; oats; and rye.

63. The transgenic plant of claim 61, wherein the transgenic plant is homozygous for the at least one nucleic acid.

64. A seed of a plant of claim 61.

65. A plant part of a plant of claim 61.

66. A method for selecting transgenic plants having improved lateral root growth and water uptake relative to a control plant, comprising:
a) screening a population of plants for increased lateral root growth and water uptake, wherein plants in the population comprise a transgenic plant cell having recombinant DNA incorporated into its chromosomal DNA, wherein the recombinant DNA comprises a promoter that is functional in a plant cell and that is functionally linked to an open reading frame of a nucleic acid having a sequence identity selected from the group consisting of: at least 70% identity; at least 75% identity; at least 80% identity; at least 85% identity; at least 90% identity; at least 95% identity; at least 96% identity; at least 97% identity; at least 98% identity; at least 99% identity; and 100% identity with one or more nucleic acids of the group of nucleic acids consisting of: SEQ ID NO: 2 (OsNAM_{12.1}); SEQ ID NO: 3 (OsGPDP_{12.1}); SEQ ID NO: 4 (OsGPDP_{12.1}); SEQ ID NO: 5 (OsGPDP_{12.1}); SEQ ID NO: 6 (OsSTPK_{12.1}); SEQ ID NO: 7 (OsSTPK_{12.1}); SEQ ID NO: 8 (OsSTPK_{12.1}); SEQ ID NO: 9 (OsPOle_{12.1}); SEQ ID NO: 10 (OsMtN3_{12.1}); SEQ ID NO: 11 (OsWAK_{12.1}); SEQ ID NO: 12 (OsCesA_{12.1}); SEQ ID NO: 13 (OsGDP_{12.1}); SEQ ID NO: 14 (OsARF_{12.1}); SEQ ID NO: 15 (OsARF_{12.1}); SEQ ID NO: 16 (OsARF_{12.1}); SEQ ID NO: 17 (OsARF_{12.1}); SEQ ID NO: 18 (OsARF_{12.1}); SEQ ID NO: 20 (OsAmh_{12.1}); and SEQ ID NO: 21 (OsAmh_{12.1}), wherein individual plants in said population that comprise the transgenic plant cell exhibit increased yield under drought conditions relative to control plants which do not comprise the transgenic plant cell; and
b) selecting from said population one or more plants that exhibit lateral root growth and water uptake greater than the lateral root growth and water uptake in control plants which do not comprise the transgenic plant cell.

67. The method of claim 66, further comprising selecting one or more plants that exhibit increased yield under drought conditions at a level greater than the yield under drought conditions in control plants that do not comprise the transgenic plant cell.

68. The method of claim 66, further comprising a step of collecting seeds from the one or more plants selected in step b).

69. The method of claim 66, wherein the plant is selected from the group consisting of: rice; corn; wheat; barley; sorghum; millet; oat; and rye.

70. The method of claim 66, wherein the plant is rice.

71. The method of claim 66, wherein the plant is corn.

72. The plant, plant cell, or any one of the methods herein, wherein the % identity is selected from the group consisting of: 70%; 75%; 80%; 85%; 90%; 95%; 96%; 97%; 98%; 99%; and 100%.

73. A method of improving lateral root growth and water uptake in a cereal grass plant comprising modifying a nucleic acid encoding no-apical meristem (NAM) transcription factor in a cereal grass so that the nucleic acid encoding the NAM transcription factor shares an identity with SEQ ID NO: 2 (OsNAM_{12.}) selected from the group consisting of: at least 90% identity; at least 95% identity; at least 96% identity; at least 97% identity; at least 98% identity; at least 99% identity; and 100% identity.

74. The method of claim 73, further comprising modifying one or more nucleic acids encoding one or more genes selected from the group consisting of GPDP; STPK; POle; MtN3; WAK, CesA; GDP; ARF; and Amh so that the one or more nucleic acids share an identity selected from the group consisting of: at least 95% identity; at least 96% identity; at least 97% identity; at least 98% identity; at least 99% identity; and 100% identity with one or more nucleic acids of the group of nucleic acids consisting of: SEQ ID NO: 3 (OsGPDP_{12.1}); SEQ ID NO: 4 (OsGPDP_{12.1}); SEQ ID NO: 5 (OsGPDP_{12.1}); SEQ ID NO: 6 (OsSTPK_{12.1}); SEQ ID NO: 7 (OsSTPK_{12.1}); SEQ ID NO: 8 (OsSTPK_{12.1}); SEQ ID NO: 9 (OsPOle_{12.1}); SEQ ID NO: 10 (OsMtN3_{12.1}); SEQ ID NO: 11 (OsWAK_{12.1}); SEQ ID NO: 12 (OsCesA_{12.1}); SEQ ID NO: 13 (OsGDP_{12.1}); SEQ ID NO: 14 (OsARF_{12.1}); SEQ ID NO: 15 (OsARF_{12.1}); SEQ ID NO: 16 (OsARF_{12.1}); SEQ ID NO: 17 (OsARF_{12.1}); SEQ ID NO: 18 (OsARF_{12.1}); SEQ ID NO: 20 (OsAmh_{12.1}); and SEQ ID NO: 21 (OsAmh_{12.1}).

75. The method of claim 73, wherein the cereal grass comprises a nucleic acid comprising qDTY_{2.3}.

76. The method of claim 73, wherein the cereal grass further comprises a nucleic acid having at least 70% sequence identity to Ulp1, wherein Ulp1 encodes a functional deSUMOylating protease capable of deSUMOylating a polypeptide encoded by the nucleic acid sharing an identity with SEQ ID NO: 2 (OsNAM_{12.}) selected from the group consisting of: at least 95% identity; at least 96% identity; at least 97% identity; at least 98% identity; at least 99% identity; and 100% identity.

77. The method of claim 73, wherein modifying the nucleic acid is performed using a technique selected from the group consisting of: transgenic method; crossing; backcrossing; protoplast fusion; doubled haploid technique; embryo rescue; zinc-finger nucleases; transcription activator-like effector nucleases; and clustered regularly interspaced short palindromic repeat (CRISPR)/Cas-based RNA-guided DNA endonucleases.

78. The method of claim 73, wherein the wherein the cereal grass is selected from the group consisting of: rice; corn; wheat; barley; sorghum; millet; oats; and rye.

79. The method of claim 73, wherein the cereal grass is rice.

80. The method of claim 73, wherein the cereal grass is corn.

The application's sequence listing, which the Patent Office published only in electronic form, follows.

SEQUENCE LISTING (199 sequences)

SEQ ID NO: 1 - DNA, 1759127 bp, Oryza sativa
  modified_base (337242)..(337242): a, c, t, g, unknown or other
  modified_base (1299631)..(1299730): a, c, t, g, unknown or other
tgtgcggatgcgggtaagtccggcgagcggcggcggcggcggcggcgcggagagaagggggggatatgcggttgagttgagagccaagtattttgtgtgggtttcggtggttgacaggtggggcccctggtagctttctcccgtgaaaaactagtgcggaggtgtgttggttttaatggctttggtttagatcccatcatggcttatgtggacgttaagagcaagtccaataatataaccaattgttggttctaaatcatttatatctaatctaatactctagtcatcctatctttctataaagttatcccccactaacttcttaagcttgacatgcaaagatgccacatcatcatctactaacaagataccatatcattatccactaattaacaagatgacacatcatcatccactaacaatcatcatatttaaacatcatgcaaacatactatatctttatagtttttataatttaagagttttttaaatacaaacatattaaattatcatccaatataattcacataatgtttcaatgtatatctttattatgttttatgatatcctatatacttatatagttcatccttagtttgtgcttaaataattaatctatggtccaaattatttttctccttttttttctctaattaagtcatatcacatcaattatttttagcctttagataattaatctacggtccaaactatctccctactactagcttactttttacatttgaatcaccattctacatactatataaatttaaattatcataaactacattaatttatttaatctgatgttatctagctattttacatgttattttttttattgttatcatactgaattcccgcagcaatgcgcgggtttcacctagttggatataatagttactccctcggtactcataaaggaagtcattttggacagcgacatggtctttaaaacacaactttgacctattgtttctataaaaatatttattgaaaagtgatatatgtatacttttatgaaagtatttttcaagacaaatctattcatataatttttacattttcaaactcaataacttgagagttatttatgatttatattcccaaggtttgacttaaacattatccataaaggaatagaaacaataggtcaaagttgtgttttgaagaccgtgttgctgtccaaaacgacttcctttatgattactactccattaatactctgtcctacctctaatatacacataacgtcttagagtctgtgttacagccggctacaaatctgtagctcgcttttttctcactcttctcttttcttctcgatatgtggttatagttggtttatagcttgctattgtacctgctctatgcaagtactactagtactatctgctcggaacttggtagattctctctttttcaagtttctttttgtaagtttacatgtaattttgacaagtttattacgatactcgaaatctatgtaagagcagagattaataaatgatgcgctaccatagatcatggttgagatgataacaacatttttcgtatgaccataacaggataatgtttacaacaaaaaataatactgatattattaagcttgatatggccatacagcgaagcttgaaattgaaattaattaagcacaaggtggtacaatgatattagtgtgctaacccaagataatgtctattgataaaaaggaaaatagccaaaacaatgtagcttgcagatcaaaagcggacaaattggataagtctagtgtttgatcatgccatacgctagttgaattctagtggacactactaaattaccgacaagttgaaacgacgctgctactgatacggataatcaatatttatcatggatataaaataaaacgagagaacatgaactgagcataactttttttatagtcaaatctacacatttagattcaaattcttaaacagtacgggtgttcgtatttttttgctaattattattcatgtggaaggtcacaagaataaaatgtctagtgataaaataaccagtttctttagacataggagtgatttatgccagacattttgactagaccttaacataaacataattagaaatggaactttactacaatgccaaagcaccacgggctttgacgctgaggcccaacaccttaacaccgtggaatatactacgaaaacaataataggcacaaatgcgggggggctcctagttagcgcagacgcgccagataattttgtagcgcgcacttccgtaacttcctcctgtttcgtcgttttgtatatttttctgttccgcatcgcttcaggggaggttaagcgtgtgggtccactacagccacgcgtcattagcactaataacaacgctaaccatatggattaatctagttatagtttttattatcaaaataatacataaatagttaagttgaaagtttcgaaaatatgatgaaaattttcaaaatctgagttgaaagttttaaaaaaaaatcttgaaagtttcaatttcgagttgacagttttgaaatttgagttggaagctttcaaactcgagttggaagttatcaaatttaggttgaaagttttcaaatttgggttgaaagttttcaaatttgacttgaaagttttcaaattttgagttgaaagtcttcaaattcgggtcgaaagtcttcaaaactcgagatgaaagttttcgaaattgatttaaaagtttaaattttgagttaaaagtttttaaattttaaattgaaagtttaaattttgagttgttttaaattatggttgtgacttttaatttttcatctataaaaagttttaaatttcacgtatatattttaaatctttagttaaaaaatacaacctcatgaaaaaaaaggaaagattaattaaaaaacataattatcggaaactaattccgtcaactaatataatcttgattattttctccgaatctagcgcacttgagcacgcttcccggtgttccctcgcgcaaaaaacagaaatagaagtaggccgaagagaaatcacgtacgaggacatgggcctaaaacgcacgctagatggctagttagcgcgtctgcgctaattaggaaattcgcaaatgcaggttatagcatgcgtactgcagtgataaatggtgtctgtattatcttggagatcaatgtttgaatctttatcgctgcaatattgtttcctttttctttcgaagtgctgaagaaaaaagaaaacaagacggaacagattcctaagtggcaaaaaaacaacgataacgcagattctgaagtggcgaaaaaaaacaagatagtggaagtgggtttggacctagcaccttcacaccttatttagaaacaatgatagtgggcctcaacaccatgacccatgacgctgagatagaaatctatttttggtttataattttttagtttgtgtattactcgatgccaaaatatatgatgctaaggattcgtttggagagtttaaagattttaagaagctgctggttgatacccaacttctgataatatgcaaaaaattgagttcaacttctgacttctagcttatatgaatgaaaaacttaattattttgggagttttcgattcagggaaaaaatagagttttccaaagctttttcaaacaggctctaagcttctaatttcaacatcaagggtaggggtggatactgacatgactcggctcggtctactcgttaggataacgagccgaatcctaactcggctcgactggcaactctagctagcttgtttagctcgcgagccaatacatccgtgactcaatagaaatctctcacttcgagattctggctgccaacaattttttttgcaattgcttaagaaatcaaacaaccgacaaatcacaaagacttggcacaaatttttttttacacattgcatccataaaaacagatctgaaagtctcgtcatattggaaccaaacaaaacaccaagcaaacaccctagtgaatcctagaccaaccaaaattaacatgggagattgacttgccgaagtgccgaactgccgacggcgacgaggacggcaagattgaacttttgctccttgatttataacttgtagcgctgtcgatggagttgcatgctcttgcatcctgcagcaggggaccttcaccctgcttgttcgtcttcctcacgacgacgagactgagacaaggccacgcttgccacggagttggccgaccggctggagcggcgacgagaggaagcgcggcaccgtgagctcacaaaccacgctgttgctgccccctagaggctggtggtgacggccaggtcgtcgacgatgccggcgtgagggcttgggcgacactatggcgatgtgatactggacagaaacagcgtgcgctgtagattggggaatggggaaatcaatcgatctatttgatataactagggtttagtggaaatcagtggatctgatgggccttaggcctacaaataacaatgcgatccacctcagcactcctgggctgctttgtttttccatggctcatttagctcgcgagccagcttgagctcgctcgttatagcaaacgagctaaccctggcttagcccgttaataaatacaaacgagccgagtcgagttagtcacgagctatgagctttttggtatatttttgttatagtttttagggttaattggatccatgccactgtaaatgtggcaaattagaaaaataccactactatttgttttattggctaggtgccactacaaatttttaaaattgaaaccatgccactccgtcactatttctgtcgttctctctcacgtcgtcatcctctaatctcacgtaggcacggcgagggcaagaagacgaggcggccgccggcgaggacgtcgcgagcgcggggagcggctgcggccacggccggcgaggatggagacggacgccgagtggttgaacagcagcttgccgacgtcgcggacggcagagccaacaggtcgaggaggcggagtggcggagttgccggccggcgtcatggccgccatgccgccgtgctaaccgtgcagaggctgcatccacgccaccatgccgccatgacacgcaccgcgtgcttgacgcatacgaacatggacctggcattgacagccatgacgcggtcgtactcgtcgatgtcgagcacgccgagcgagtccggagcctgtgctcctatgatccggcgttgctgtagaggacgtcgaggcggccgtggcgcgtaatggcgaggtcaacggtcgcggcaacatccgccttgacagtgacatcgctgtgcgtgtacaacgcgcgtcagcgccgagcttggcagcgacggcacggcgttcgcccgctgctgctctcgctccccatgccatcgccaccgccggagtgccgccgcggggttccgttgctgctgctcctgctcccgctcccggagcgcgccggagtgccgcccgcgacccgccgcgtcgccccgaatcgtcaactgccgcgccgtcgttgggggcgggctgcgccgcggcggccttgtgctgctgctgttgtgtgtaccgtcgctaccgtaagtggtggtcgccgggggagccgaggcggcgagccaccagactagctcgtcggcggggctctccctgaccaagccactatgcacgcagtccatggaggacgagagctgctcgtggaggacatggagatgcacggcgaggatgagctcctcttcctcaacggcgtccgacgagaaaggtggtaatgcatagcggcaaccgcgcgaggaacgaggcccgcagctgcggcaaccggcattgtgaaaatcaacgatgggaacggcgccggaggtgaagaagatgaaggccgatctccccgttccccgtgtctccggctgaggttcttgaggcttcttgaagaggacgtcgaggcgacgacggtggcgccatggcttgctccggcgtgctccggtttgacggcgacaaagacgatgtcccggtgatggcgtctagtcccggcagcccccacggcggcacggaccatagagttaggaaattaacgggggaacgacggaaaaggcgacgggatggcatggattcaatttcccaaaattccagcggcacctagccaatatcgtaaatagtagtggtatttttctaatttgatacatttacaatagcatggatccaattaaccctagtttttatcataggtcatttatataacaagttttgtggaagattcaaaatatcatttttttggcaatttatgtcccaaatatactaccaagcataaaaaaaataaaataccaattctatttctgccgtgaattattatggaagtaaagagaaaccgttcaaatgataaggaaggcaaaccttgcagagaagggaattatcaatcggaacacatcgctgcgcgtgttcatcatactacctacgaaagtacgaagccgtcaggaaggaagagccctcaaaaaacgtttaccacttaacccccttgaaactccttgtaatcaccatcccaccccaccccccctccgtcccccacggggctcttcttcccccggttattcgttcgcctctcccaaaaccctagccctccgcgagcgcgcgatccccgaaaccctaaccccgccttcccctccacatcggcgccgtcacatggcctcccggggagcctacgacggcggctccggcgccggaggcaagatccggaggcgccccccgtcccgcgccgccgccgcctcgccctacgcgcgccccgcccccgcatccgcggcgacgcgcctcggcggcggcggcggcggcggcggcagcggcgggtggttctcccgcctcgtggccagcggcgcctcgctcctcctgccctccgtgttccgcaagccgccgccgccgcagccggagcacgagcgggagcgggagcatctcggcgagccgccttcgctgcccgagttgctcgaggaggcgccctcgcaggcggagacgctcgatactccgccgtcgcctccgcctccgcctctaggtttgtttgaccgcgttcgccgctagctttgttggggccctgttggtgttgtgtgatgttgtgcagtttggtgcaatcatttcgcataggccaaaccaactctaaatctctgtagtcgattaatttagtagcttcaatcaatgtagatcggcatgttgcgttgcatatggactcttagctatgttactatgtagtagctgttgtttattttgtccgttcttccgacgattgggggatgacggcgtaatcgatgctttcatacaaagtggcgattgtcggttcacgtgttgttagtgactgctggcaaacttacaaagtttcctgttgtttgtatacacagaagatgacattccggaagaagaagaagagggcaccggaaccgtggctaatgtaagctggctctgtaaatgcatattgtaaatttgcgtattccacgttgtacttgtcggataataacctactagttatcatggttagatgtttgctatgcttttttaagcactataagtttatatagaaattaaaacattgacttctattttaagccggtagaatttaacctctttcacttgaaatatatggtcgttattattcttgcaagatttattaattgatacttctttgaatggataataagataacatgtgtaaccatatgaagtcttcttaagttacacacttacatttttgtccagtgccagtgctacttattttaccttgataccctattgaatcttccatatgatcaagttcctaaacacatgttgctttatatgtggaatctgtccattgtcaatcctcagaattctgccaaagatggagatgacattcttagaaggtctgatagctatgacgttatggatcttgaagaactattgaaacagaggacattcacgaggcaagtacctgtttttgtataacattaataggctcatgtttagcaagtaatttgagcagtattagatttgttgctagcatttcagtaactggtaggcataggtaccgccgatatatcttttaattgcataataccccaaatacagcatacacctaaggaactgaacttgatctgcaatgatggggtacatccatgaagttcataacacagcatcacactattaccatgaaatgatttgtactaataataatttctatgtgaccaagaaaatataaaccatgaggctatagaaaacatgggtttccctaactggtttttctttttttaggagaaaaagaagtgtacttcagttctaaagctgggaactaagaaatggacagttgtatggcatttactttggtattagttagttgtagaaaataccattgacatttctggaaggttctgttaccttagataatttttcttacccgtgtcttctttttctcatacgtttgtttatgctaccacattctctcctgtaccttctcccttctttttttctcacttaccgagaccaattttctgtggtgaagttatacttcattgttaatgtcatgaaccgaggccatgatggcataaccaccactgggagggtagccgggcggcgccggctattggagaagggatgtatatttagactagggataagaagatattaaggaaagaaattatactaatctgattcattgcttaatgataatagacacaatcccatccttatatagattatataacttgatccttaagtaaggactcaatctaatctttgactgataatcttatctctatatgggctgcttatggccctcagccttttggctcaatgctcatcacaattaacttactttattgtagttccatttaggctggtatacattggagaacactaagaaaattgatacatcctgcatagaaaaagaagttcgcattttctttgtagcagttaatgcatcagcctgcagttgtatatgatttgcgtacatgatttgtatggagtagcaatgcagttgggggaacacatcttcttgatagttcaatcctcatttatcctttaatacttccatgcttctgtatgagttgaagtgcaatgccatgttttctttgctagatcctattgttgtgaatacctgttttgcctattgcattgtaacttgcaaatttgttttgctaatgtccaagtgtacagtagaaatgcgaaaacatatttctatcttacaaataattttctgtcttgcaggagtgaatttgaatatttgtctgagttgttgttatctagaacggttgggtccaaattattgattccaggagttggtaatatgaagaaaatgcattttcctgagaaggcaagtcgatctggagacttacctgttgatttctcctttagaacattcaacacttctgttaatacgcaagtcatgttgctcactaaatattcctgttcatatgatgaaattgatttcttttacaatcacccatactgtactgtacagaacataatttaaagtgttgaagcaacaatataatttcttatttttaagatactagaaaaaatgcccgtgcgttgcaatgggtaaatgctattttaattttattgttgttatatggtttagctagggtaaaattcactgtgggaattcgcttggatatttttttttgaaaatcataagctgcaagagtccgtatatcatctcaagttagcatgcgagtttttttaatgatatttcttatacgactccttctgtatttccaaaagcaaatgagcttaaaatccaactcaaacacggatctgtatttctaaaagtgaacgaacttaaaaaccgactcaaacccggatgacataccaaaataccggcaaaaacatcttcaatttttataatagtagagatatggcatattgttgagttaaaacccttgaccagcagaatagtttgttatttttttttcgaagttgaggaaagcatatcataggtcccccttattccctaaatttttgcaggtcacttgggtctctggatttgagtgggtacataaaattgtataagtgggtcaacaaagtcatcctacttttttttttggtatacttgtataagtggtctgtagttgcttattaggcatggtttaaacctgtacttatgcacatacacatgtttaggggcctatatgtgcaattttcgactttagaaacccaacttttagtagtccctggtacacatacttcttttttctattcctacatgagtttcacttgcgattctatctacatttgccacaaaatagcaaagctcgtaccatgaactattttatctcctgacacatttgttgtttataccattgatatgccatatgttccgtgactacaagggtaacataatctcatgctattcattcctgcaggatcaagttgcttcacctgcagaacttgcaaaggcatacatgggttcaagatcttctaagggatcaccattacgtcttagattgcatgacccctctgtactttccaaatcgatagaagctaatacaacacaaataacgaggcctcccaccctctctctgctcgcgagtgcaagaaatcatgctccaaccacctctgatcgtcttgggagcaactacacgacaccaaatagatcagcaatatacaaaatgtcatcatctccttattttaaggttctgttatttcctacttcatttaatgtctaattactttatgcccgcagtatttctgttatgtatttgcacaaagagcacaatagtacatcagatcttgcatatttgttaaatagaaaaattgaataggtagccacagactacttgagaaactcaaagagacaactaaaaatgtattacaccttaatcaatctgtttagtgcagcatggcaatcatcaagttaccttgattcaagtattatgttaccacgctgttgcagttgctctctctgaatttcattagtagaaaataaaccttccatacattattttcttatttggcctcttaaaatcacaatttaacatggaaaggtccaaggtgaccaagttgtcgtatgtatatctagtatatgagttaaatttaattagtgtgtgtgaacaatgccaaatgtgtcttttagcgaacaaatatcagtttatttgttttaagcaatattagaaattttataattgttctttttctatcgaaaacatgtgcaattagctagtgctctacatactgccttattttattctcattcttgagcacaataccctatctctgttactatgtggttacatctctaactcaagttcctcaatctgttcagagtgctgtttcttccagggatttgtttggtactgtatctccatatcaggctccaagcagccttcatacatttggaaggcaggtattaatcacgaaacataatcttattttgctgtaaatttgttttgggtttattaccggcttctggatttatgttgaactgctactgcatgacttttatcttggcttctttgtttgattagtgaatgatttatgacatgaaatgtttggaccttcaatattgatcactgattgactcaccacataattttgttgctttaaagtacacgatacaatgttaattgcagatttttttgatcggatgctgcctattttatgcgtaaaacacaagctattattttgaaatctaaagataaactagacgactctggaatatgttttcttgaaccctctttaatcatggtaaattggtaatagtagttggcaattagtggtgtacctagaagttttctagacttgggcaaaaacaacttcagctagcatctggcgtcatcaagcgctagtggtatgacatgccctccattttgctgtgtgatggtgaggcctggtgtccctacaagtgtcttcaggccctgcatccaccactgtttgcactgtttaccttaaacttcttcaggccctgcatttacactgtttgcactaccttaaggttttaccctactattgtagttaccgaatgcataaatatagcaaacactaatttccaggatgtgatttacagtttatatattgctagcagttagtgacacagtatttggacaatatatattttatgttaaatgaccaatagtgcataacattgtttaaatgcctaataattattttgaattggatacctgtgcaaattttcatggttacataatttacttgtgggctacagtccacttaatgttctttgctgctgtcctacctgcttagatttgatgctaccttgtatgtaacatttactgttaataatgaatcaacaggttctgaagaggaagagtgctgctctcaataacgagagtgcctctgttggtcccatacgcaaaatgcatcagaggtacaacagagtgtcaccactgttgcaaactcggtcaggccaccgtggatatagtggtagtcatgctagcaaacttgatgaaggtttggaacactcagtacaaagtcaaaaacgtaggtgtctggataaagttggtgatattactcgaagtggtgtacatgacagagcaaatgatagcagttttggtcaggcaccagcacagtcaattcaaatggctgcaaagatattgaagcagcttgatacgataattccttcacagaaggaaggcacattagcaacaaggcaaaagcatgtggacatcttagatgttgaggatcctatttctcagaaaactgaagtatcagcacagggcagtcttttgaaaccatcttcgtcacgagttaaggagtctttacctaataactccaactgcgctgctaaatttacctccgccgcaaaagacagcaatactgttgatgctacatctgacaaatcagctaaattgatgcccaaggtaatgtttggatggcacctttttcctcctagggtacataatattttatcaacatactgacattttctttattgtaggattggttggagatggataactgtaggggaagtacaaagttgtcactcaaccaaggaaatgataaaactgagagaaagcaatcaccaatcccagagaataatgatatgagttctggaataataaacaaggagaaacctccaacattgcctttgagaagtcatgctccttcaaatctagtattatccagtgaaattgaccgaaacaaaatcctagcatcatcaaatggcttttcattcccggttccggctgctctgactggccattctcaggcccctccaacacctactttggcatctccacctgtactatctgttgagaagcagcagctgtctgcatcatctagtgcaccagttacttcagtggaaagtattccaaggttagtttctgatcggttgtttgaactgatgtagttacagtcaaaagcatagttttaaatttgaagtacctttgcaatgaaaatgggcaatggttaccaagtaggttaacacataagtacttatgttatcattttatagtgttttttgacttgattgtcgttttatagttgagatatggtagtctgacacatgccaattatgcttcagtttccaatttatgaggatactcacttatttccagcacattaatctgacatgtctttttctccagggttttcaaaccagtttcagaagaagcctcagtttctaaccaacgtgatacaaagtcgaatacagataaaccaccaatttctcaaagctctgggcaaattgtttctttcactagtaatccagtatttaacgtcatctcctcaaaaccaacaaccttaagcaatggcctggcagatacaacaaaatctgcttctgctgctgtatttccttccaatggatcaaccaagtcagtttgttctacaaatgctggctcttcaacaccttcgttcccaaagttctcatttcagcctggattccgaacatcaacctcttcagtgcaatctagcggtattcaagagcctgctataacagctccattcagcactgtgagtagtttagctgggggcagttcatcgccatcctcaatgatatttgctggtgctacttctcaatctagttccatcaccaccagtggcagtgttcccttccaattctcttctcaatctagcagtgaaagttcattagctggccaagacaaatccaaggcagcaagcagcagtgccccttttagtttctctccacagtttggcagtacaagtccgtttgcaggccagggcaaatccaattcagtctcctctcagtctactttgctgtctggaagccaatttagcaattcactatctgcacagacttcaacaagcaattcaaacctattatcttcagaaaaagtaaatcctgggagctcgccaagctttgcatttggttcatcagcaccaggctcaagccctgtgttttcgttagcagttggttctggcactacttctgcaacacctgcttcagcatcttcaccaattttttgcaaccgtttaactagcacaaatgctccaccttttggctcccctgccacttcaccttttagctcaacctcgagccctgtattctcatttacctcagctacgcctacgataccaaatgcatcacctacaacaccactttttggtacaccgagcccgactgttggtttaagtacaggaactgatcagatgaatggaggtcagatggctggggacaagaacccgtttgctttttcagcagcttcaccctttggtcttccaagcagttcaccatccactccaactctgtttagtacgccagcaactcagtttgcttcagctacatccgcttcaccgggcatgttccaatttggccagcatagtcaatcatccccaggtggcttctcaataggcactactggtggcaacagtgaaaagtctgcaagaagaattctaaaagttaagcgaaagaaataagtcacttcgtcctctgtcaaggacaaggatcatgagaacttattacagcctgcattgcaaattgctctggtttttcagggctgaggcgatcggcaaacagaaattcacatttcttcattttataccaggagtgtttgcctgagctggcaaagatgccagtgttttcttttggctgatccgaattttggcacatgagctatggaggtacccaatggactgttttttgaactgaatttttgtatgatttatcctctcatgaaccattgcgaatttgttaaaatttgaatgtcatctgttcttacaaacctggcattgattctgtgtacctcttctactctattctcccatatcgatatatggtcgaacgggtacaatttcatttactctatgccactacatggtcgcatcatatagacgaaggattcctattcgtgttcagatggaaattggattgtagggacaagttatgaagatgaagcattctcgtgtaccatctcatgtatttaggttttaactttttgtttatttcctgtcattcagaattgattttggctcacggcacgagcacgatggcagaaacaccaggaaaaaattgttgaggtgggagtaattgtttccttttgaaagtacgcacatctcaagatatatacgtgtcaaaggtaggtacataggccagatagtggacagacgtacttctgatcgagtacatatacatccagttccatcctctaacaaatctcgtccttagactccgttagattctctaacaagatgaatattaagtgtagcaaaagtgaattttaattattaaaaacttgaaaaatagatttaattgattttttatagtaatttctatgtagaaagttttcgcacgatacaccgtttagcagtttgaaaaacgtgctaacggaaattgaggaaaaatctataccttgttggagtttagtactcaacaattaatcttctgagtaatatcacatatactgagatgagattttgaaccatggtcaaaatacatctaccacaggcataattcttgcttctacccaaatacaaagcatgaaacgtaagttcattaaatcagatgttttctgatccttagatctattcatccaacggctcatactaagagttggatctgccctgcaattagcgatctcccacgtcttaacagcggttagggatcgatcaaagcgaaaaagaaaacgaaaaaagtttcttcgctcgccagcccgccgccgaccgcctcctgccgaagccgctcgccgcctcctcgcgtagtcgcgcgccctacctcgccgcctccttgcacgcaccgggctccgccgccgactccgggcgcgcgcccgccggagccgctcgcgggttcactggcagaaaagcacgcacgcaatttgtaaccccgccgccgtcgcatgccatcctccgcacgtcgctgcgccccccgtccccctccaccgctgacttcgccccatggtgcggccgctacaagccgctgcagccccgtcgctcctcctctgttccctcgcacatcgttgcgcccggcgcccctgtcccctccgccaccgacttcgccccgcagcatggccgctccaatccgccatacctgccccgcgtcatttgtcgtccacgcttccaccagttcggccatatccgacctccagcctcgccagattggcgccgccgccgaccctaagctcgtcgtcgagcattcaccgtcgccccatctgccccgtgccgatccatccctagcgccgtcgccgattcaccgccaccaggtcacgtccatcgtcttcttgatttgctccttccgcttcttatttgtcctttcttttgtatttgatcagaaacggcaatgaattttattttaacacagagagagagagggggtgggacgggggaggggaattgattgaaaaactgaaaactggagtttgttctttagctaggcaccaaagatttctgagagtataattcaccttggccatgtacagggcatcacatttcacatttgtaatgttgatgggaaagctacagataggggcagagagtaactggagaaaatagaaatagaaatgagtagcgatgttactagtgtacatactttatgcaagtcaatgaggatcaagagaaggagaaggtggcggtatcctagctaactggtcgtctcgtggaggtaaaaaaaaattctttgattccagcgaacctatggctatgtttcgttgataacttctaaagatcttcctgttgttcatcctgctatatatggtgttcttttaagtctttcctccaatcgcctccttatgttctactccctccatttcacaatttaagtcattctagcatttcccacattcatattaatgctaataaatctaaatagatgtatatgtctatattctttaccatcaatatgaatgtgggaaatgctagaatgacttatggtgaaacggagggagtattataccagtggtgccgtacctatggctatgatgtgcagtccatatatagaatcaatcactgaaaaaaatgagtttagataagtcacagccattaggactatattaaattagtgatgaataatgtatttgcacattttgcagaatcatggcagtaattacatggtcaggttgtgacaaaaaaaatcagagatacctatgctcacgttttgatcaatgaaccagttgtagacattctcagattttggcaaaaatgcacaaatacactacaaactcaatacacattctttgaatttctgagtacagacagcgaacacattcagaatttcagattgcttcatcagtcatcacagagcacacaaattcagaaaagccctgttgtgagaaatgatgattatcgacacttcttgtgtcttaaggtagctctccagcctctagccacttgatggtatccaaaacaataagatttgcgggctaatcaagtagcaacaaatcagtaccctgaacaatcaatttaagaatgtaaatgcacacaaaaaacagaaaatttcaattcgatcactaggataaattcaaaaatccagacccaattcataaaatgatatagttggtacgaaaataatatatcttcaaacgatatagctagctcttgtcatgattctgatggtcatttaaaatatctatttgtcaagattttacaagtgaacaggatcaatggcttaggttgctttcctttgaatgtagatgcgcgtgctggcatgatatttagaaaataggttttcccttgaatgcacattttattagttaatttaaatgaacaaaatctttatgtattttttcattactttcgagagaagaggacactaacaaaggccaatatagaggtaactttctgatctttatatacaatggtgatcctggcggtggctatcctacccatgacgaggctacccaggtttttgcttgactccctgattgattcagattcttgttgccaaaccattctccttcggggtatcagggctactccagcgaggagcagcagccaccttactactaccttgctgtcgcacaatttctgttcatctgtttactggaagttatgctaattgactaaaactgtgatggtactacacactgacttgacaattgacatatgtattgcctacaatgatggtttattggtgatcatcttcctttttatcatgatcttgtttattatttttgtttatggagtaacaaatggattttgtcgttgtcaaggtagataagagggacatcatggcattgcagggtaagaaagcataggcaccaagcaaaatcagagtttagttacgtttgtcaatgaatgttaattcgtatttatatgccttgatgacctgcttctacagagatgggattaacccatgatgcatatgttctattgaataagaactgcatggtctattatgtttatttatgattaaatatgcttatttttcttcagagcaacatctaaccaactatgtataatctaagaaattgagacatatccctattgtttcaaatttcaaagagtgctatgttaatttccttttcttagattagtacattctaacctttatttgtctgcacataccaacaattcttcttgcattaatgtatagttcttaaattgacataagctttatattatgagtattacacattaaagaaagcatcttatatcagaccatactcaggcttttatgttaatttcttaaatgcaaattaatatggtgtttggttattcaaaagaaaatggaacaatgaaaacaaacgtggattttttcacaagaatttcttttttctatcgaagtgtcattgtcgtgctgttatgagaggaaatacttctctctgaatttattgatcatggcaaatggacatgtgaaattttcgtatgaatgaaacaacagaattatatttttattttacataccacctgtgatgctccacttgtgataatctagattttctatttattttatttttattctcacattgtcattgaaatgatattgtttttgatttacatatatgcacatgattcctcacttcacttccatgcccccaggtcgctacacccatcgccgccgttgccagtccggatgccccagtgaggctggtgccctcgaatgacaccacaagcaagtataatacttcatccattttcttaaacatgctctctatttgtaattcccactcatggaaaggctgctcaaggtcaagaaaatgtaacccgtgaagagactaatgcttctatagtcacacaaacctgtccaggaactaggataggtaccatgtttgtttccataaattgtggatataaactctgttaggtatcatgtttgttctgtagtaggtgctcgatggaatcccccagtgaggaaatttgttttttgttctgtaccagagaaaaggcagcgaggagatctgtgagtgaaaaaaaataacagttcaatgtccaggccactgttaacgatcaaatttggtaagccatgaactagattcggcatcgggatcgaagcggatttgatagggaattgtcttctggaaacagagtacgcatcggctacgagggcattggctgaagactgcatcggctaaatcagacagaagacagccgatgtagctgatctcgttaaggtggttatataatcgtctccgagattgatcaacgtgctgtgcaaggattaccatgattgagataagcacacggatagacaattgtatctattaattaggatattttaaaaagtttatttagacatatgcttcggcaagagtctatcgtgaagacttgttcgtatcttagagtttgttagagataagagtcgtgttcggcaaggaccagtcatgtatctcgggtataaatataacccgatcccatgtaaacatctaacgacagtttaataacactttcggcgcatcgccacctttttctattttcattgtttcgacgagttcttgcttttgggttgagctgcatcaatttcgatcttcaacaagaggtaaaacttgtcatgacgacttgtgttctcgggattagtgcttacatctttatgacactctaatcttggttatgtaaatcattgagttatcatatatgcttcataatatttattaatatcataatctaaccctaaaccggccaacatctatcattggaaggcagctgatagagttagatatcgttgttaatctagattatatagcatatctaccatctttcagaggttttcatcaacctgtttagatcttgtatttatttttatgcttaatgctgcatcggttgagtttgatctattaagtaatattcataattgcaatatctagcttgtcttatgatcatcaatagatatagtatcggggtttcagccgatcttacctgatttagttacctttaatgcttacatgttcacttgatatgctaaatctgtcctttatattaagatcttattgcattaaagtatattagacttgtcgtttgatatattttgtctgttttaatatcttaataaagagtgatatcagagtattagtcgatacatgttagatctatttgatcggctatgctatgaacgtatatataatcttcatcttaaagtacctttaagcataagtgatttatattgtctcgacttactgttcgatctatcccaatcacttggcttaaatatatctcgagaagaggattatatatcgttgatatctatagccaatcgagtagatttaactttatattgctttattcttcattgtcgatctaatgccagtaacatcggttcaatgattaacgatatgccatcggcccttagccgatcggttatcgtttatggatttaacctcgtctttcttgtttttccttcttgttgattgcaagatcaaatcaactggcacgcctttgaacccaagagcaagatttaggacatgcactggagttaagcagatctcccaggccagtgtgtgttttttcgcatcaacagccacccctttatatttacaagttgtaacttcctcttttgattgcattcagttgactctgcaaagtactgcatcactaacgtctgtataaacctaaagttgcattcaagtgtagtgtttttgaacttgttgtggtctatgagctttattctgaaggattatactgatgacgatatattggtgtgctttggatcaggaaggctgtctcatcctactggtcagtcaaggggaatctaattggtagtataaatatcagagaattaggtgatgatcaggttcaacatcacagattcagatattctcactttctgtgttctttaaccagtggcacaatgtgtgctatcaatgtaattaaaatatggatttctatatatgtattgctctttggattatttcagcatttcaacgagttcttaatagacctttttttttcatctgtgcatgcaagaggaggcaacctacttgggatggtggcacctctagccataggtttggaggagggcaacaagcagatgcaccaaagggagctcaaatatgaggaattatgtggcaaaaatgagcttgttggagaggaatctttgtaagatatgacataagttcagaaagttaatcaccgctgcaaccatctctggtgagtctttttgaggaagaccacataggaaagggacgagatgagcacttctagctacagatgcttaggcgaagttgggattccatagaaaggaaatgtatttaacttctcaagaatatattggcaaatataatggtgtttaacttctgttgtatgaattgtacatgcactaaaaagcatataaatctgctctcttatgtgtggcttcccaagtttgataaattgcccaatttgttctgtaactgcaagatgccatgatccagttttacatttatttttctatacgtatgctgatattttgtaggtaaatctagatcattttattgtgtttatttttcctaaaaacacgaggaatcgtgatgatcataaagacaatagcatcgtacaagcctaaagcaaatgttgatattgacattttcccttttgaaaaaaaaatcataagttatgtatatttgtgacattttcaagaactagaatgtgcataaggatttgctagaggcagcaacaagatacctttttttgaagtataggacactgaatttaacaaggtgaaagcccataaggatcaaatctgattttgttttccttgtgttgtttatgaaagaaatcttatataatctggtatgatcaaatgagagtataggacactgaatttgacaaggtgaaagcccataaggatcaaatctgatttcttttcccttgtgttgtttttgaaagaaatcctacatgcttttagttcacatatctagctagggatctcacatgtatccaatagtcatgaaacattaatttgttggttgcagattgctaaggtgacagcattgttttacaattacatttttttaatagaagggataagttattttgtaactatcacttaataattgatatgtttctatttgcaataatatatattacgataacgtgtctttgcacgtgcacgttcactagtttaataaaaaagataagagaacgcacgtactgtatatgtttagtgatgcacatgaagtgatttgaacgataacagacaaatgtgggaaatgtgtgaaatgccctcaaatccaaattccaatcctagaacgtgctcaatcaatgaggggttcatatatagattatagcataatcatagaagatacctgcactctatttcttcaccaataactaattcccgtggaaaattgtcttctgccttaaaggactaggatttggctggctcatattttggattgcagttttcggtccccgtatagaatattctttcggctaattaataaaatttttgaatttttttaaaaatttcaaggtggaattttttccatccgaatttgtcttgcccatctgcttacccatcttgaattttggattgcattttcggtccccgtatagaatattcttttggctaattaataaattttttgaattttttttaaaaatttcaaggtggaattttttccatccgaatttgtcttgcccatctgcttacccatcttgcctatatggacgtgactaggtagagtgcgggttcagatctcctggagttgtggacgaccccaccaggtggatttggccaaatatagaccctccttttcttctacggctgagatcatatctcttaataattattataaaaaaaatctaagttttgcttctactccctccgtcccaaaatagctcaatctaggataggatgtgacccatcctaggtaagttatttttgggacagagggagtacgtccttaggcgtgtagcctggcgcagcggccatggcttgtcagtggcacgcggtgccgacgatggccagtgcgtggcctcggggatataccatacggttctcctgatgaaatgtgttgaatgttgtcgctctgaattgctctaacaagtcatgttgtgtgtggagaaagagatgcatgtttgattagtttattgcactacgtattgatttgttctttgtggaaagaatgtgccttgtattctgtttagcgagagcgtgatcataattatggaggaacacctgaaaactttccctccaaatcgacactaataaatgcaggggaggggggggggggggggaggatgccagctgtagaagcaaacggagggttcagatttagccaaacctatctggtggagttggcctcaactccaggggatctgaactcgcatggtagtgctttagtcctaacagtagaccactccattccatatataattctccctttagtatatggtgcatgtctttttttaacatctttaataacttatatcttttaaattacatattatcttcaagatatatttatattattgtactctacataaaatatatgataaaacaagatccatgttgaatatatttaaacattttattaatttaaaagtaatttatttaaattgtaactctctatagattagaagcaactaagttatgactgagttgaaataagaaattatatgtagagtaaattcacgagaaaaatgtagagaagatttttaattaaatgcatttatgaaagtaaattcaataaagtcttaaagtaatttacataaatcataaaagcaacttaacattgtcgatgtttgatgtcgcgattccggtatttgcatagtatggggatcgttggtactaggatatatgctagattgtaagaaaagagatagggacgaggatttttatacaggttcggacccctgaattgtcaggtaataaccctactcctgttggctgaagccggtcgttgctcttattcaccataatcacaccagtacaatatttggggtagcctatctaactgttgtcgatctggcggtctaaagtgctgactcgtagtcggtagccttcctcctcgaatccacatccgacgagatcaaagacaacgctatgtctctcctgacagtatccgtagacaccgtaggggactagccatgcttatctctgaagtcgatatccagcgtcttgtcttggcgcatgttggcttgtatgttcattttgtgtcttgatctattgttcagtgtcccctctcttcctagggggccttgtatttatacccataggtgtcctcttgtccaaatagaactagagaaaccaatatggatacaatccgagtagtccttatcgtttccatgtagaactctattcatccttccttatgcggaactcctcctatatccgaaggttgtttccgtataagacatggtatgtggtgggtcctgccgagatttagttaactactattaggtatatggtatccataaccttgacaaacataaaatggaagtaagttattacaccattagaagtaaattcgttggaaggagaaaaatatggtctatctaaaaattaaatttaaagtccagaaattatagaattgactagaataaataataaaaataatcattttagagcattatgaatgtttaagaagtaacttagtcaaatctaaaagtaatatatatatatatatatatatatatatatatatatatatatatatatatatatatatatatatatatatatatatatgataaaagtaacttacatatatcataaaagtagttttacaaacataaatatttttgcatcgtaatatattcatgcatatttttcttggcagaatatattcatcgtaatatgcttaacatttttcacagaatattagagaactagcagtgctatgataagggcagccactcgagtaaagttgtgggttggagagaggtgggagcaaggtccactgcgacgactagcagaggagagatgacgtgatttcgttgccgtgactagccaagagtagaggagagaaatatggaatggggtcaaaaccataaggctttggtctgggctcgaagtttcgttgcttcagctccagcaataaaaaaaatgcattggtctattgtaacagccctccctccagaacagcgtagcccaccccaaccgacgagcgggcccacttacacacaccaccccacttacactttcgtcctcgtttcgtgtaaaagggttaacccgggagtgatgtggttggagggaagatgccttataagtcggttccactcgtgctaatctagtaaggtggtactaaacatacgcacacagctcacatgggccacacaggcatacaccccccctcaaaggacccgacgtccccgtcggtccaacttacccagccacacaggcaaatgtccaggaacacaccccctcttagcgcacatccgtacgtccagtgtcgatgccatatgccatgccttgtgcctcacacagtgcgcacatgcgccatgcgccatatgcccgcacactgacccgtacgcgcaaccgcgagggtcggctctgataccatttgtaacagccctccctccagatccgcgtagcccagcccaaccgatgagcgggcccacttacacacaccaccccacttacactttcgtccttgcttcgtgtaaaagggttaacccgggagtgatgtggttggagggaagaggcctcataagtcggttccactcgtgctaaactagcaaggtggtactaaacatgcggacacagctcacatgggctacacaggcctaatccttattgggccgggatgtcacatctattgcttagaccacaatctaaacgataggtttacggtctacagtcatctaaatgttgtttaattgtgtggtctagatggtctagttgaccgactagacggtcaaacggtctaattcacagtttaggtcctaaactagacgataacccgtcgtctagcgtctagacgcggtctagaccgtctagactatggtctaagtgaacattgccttgcctccgacgatccaactcataacgaactgggaaccattcggaaagctgctttcaaaggtaaaaatgaaaatcatggcagatatgctactgattattgttggagtttggcttcgtgcacaagagattgccaaaattctcaggatttctagctattgtttttctttcttcaaacattatcatgacaatttggattatacttgagatataaatttcagaaaacacccaagcgtagaaattcaggttagactaagaactgctagtggaacctagctttaatggtgaactcgtcatctctaacatccggcgttgctgctgcagtggtgggtgtcactagaacggataccctcatctcaatcgggtggtaagcccatctcaatcgggcatggcgtcactgatgtgaagagctatctcaatcgggcaaacggccgtcatggatgattctatctcaatcgggccctaagtaaagcccgtcaccgatagctttgacccagacgaccagtcaaactatagcccgtcacagatgacctatctcaatcgggccacaactagcgcccgtcacagatgacccttatctgtgacgggctatagttaatgcccgtcacagataagggtcatctgtgatgggctagtcaactacccgtaaaaattattttgctatagtcaacttacaaatataaacatttcatatgaaaaatggaaaaatagtcatcggtgacgggctttagttaatgcccgatagagattaagtatatagcccgtcactgatgagtcatctgtgacgggcctagttgttatctcaaacgggcctcaagttggtacatgtcacagatgatggtcatttgtgacgggccacaactttaggccggaatgttatctcaatcgggcctaaagttgtggcccgtcactgataggtgtcatccatgacgggcttaagttttatacccatctaacatgtctatgcgaccatatctcaatcgggcacttttcagcccgattgagatgacttccttgtgacggcccactatttctaagcatattagagcccgtcacagatagaaggatctgtactagtgtgtaacacatacacacgaccatgcatgatttggaagacggtcatgtatgacattgacagttccaaacctttcacttagcccatctctagaagtgaaggatgctgcagaagtaattataaaggatcaaagcaacttgcacaaataatacaatgatttacgtggaaaaacatcctcgagatgaggagtaaaaaaccacgggacctactcggccctctccaaaaattccactatttgataatgacagttacacaattgtcaatggagttctctctggattacactgttggacacaccaccaaggccaacaccgtattaagctagtgaccacaggaagcacaacataacaagatgcacaatttgcgttttattctgtccagcaaagcagcccggtaagaagtgttgggttacgcgtaggctacgatagcataaatcaaaattttctatcgcgtaaaccaggaaccatgcaagtattagatcatagatcgttaccactcgacgcgctgcgcagcggaagaagacgctgagaagtcgaaggaactctcgcgaagtagcgcgcgtcgatgtagaggaagtagtcgatcgcatcagctcgaccttctgctcctcgtgcgttctcctcaccgtactcccacgccgatcagcaccacaaaccagcggcgcctctaccggtatccacacgtacaaggacggaacgccacgcgcagatgtgctagcacccgcgtgcggctaattttttgctcggggagggaagtgatggctagggtttctcacgtgatgcaatgcctccgccggtcacacccctcacgaatatataggatccatcactcgggcctacatggcccgtaggactcctattcggatccctatccgaattaagctcatattggatctccatccaatccccttattccggcccattaagtgtgcgaccctttaggttcatgtatactcggctgtaacccgaaaactccttttcggtccacgcgtcaacagtggcccgtagcagaacgtattgacctaccgggcatacataaagatcatatcggctgaacctctactgtatacttgtatgaacccctttgcctcacgatatcgattaagctcaaggctagatatgtgccatcctctaatagctcaatcattcacttgaacctgttgatagattatataacttgtgattgactactcaatcacctttggcatggtcatgcacttccataatctacaacatcgaggggcccagagatatctctctataggaggggcaaatcccatcttgattattcatatcccactacatgtttcatagcatacccaaaaactacttttataactacccaattacggagtagcgtttagctgtccctaagtaagctactacacatgttgggaaccatgataatatcaggtctatggattcaacaccaacactaaatgagatcactgatgacacaacacatatggctcttgcagtgtctcatgttgggtctattcaacaacatgttcactaacatgtgtccacattattaatttggtatctctataccatgatccatgagacatgatcatcaattaatacatgtgttgatcatctaaacatatttgttccatatatgatatttgatcagggatcctttagaaatagcaacatataacataaagagtctcatgaaagaatcacatattcattaaccaataatgagtttatctatttcaaggaacaaagtcagataaatatgtaaacatagtgtgtgatacaatcatctctataatagcctctagggcatatcactaacagtctcccacttgcactagagtcaatcatgaacgtatcttatacccattgccctagtgtgtgcctcatgtttaggctgagggagtggctttgtcaatagatctgcaacattcaaatccgtatgtattttgcatatcttcacatctcctctacccactatctcgtgaatgaggtgataccgccgtaaaatgtgtttggacttttgatgcgatctatgctccttggcttgcacaatggcaccactattatcgcaatagaggttcatagggctagaagcactagtcatcacacctagttgagaaacaaatttctttatccaaacctttgctgcttcagaagcggcaatgtattcggcttctgttgtagaatcagacactgtatcttacttttccaactcacagcgcgtccattcaggcagaacacaaatccagactgcaatctaaaatcatctttgtcggtttgaaagcttgcgtcaatgtaaccatttaccacgagctcttcctgtcctccatagactaggaacatatccttagttcttctcaagtacttaaggatattctttacagctatccagtgactctcacctggatctgattggtatcggcttgttgcactaagtgcatatgaaacatctatacgtgtacatagcatagcatacataatggatccgattgcccaggcatatggaatcacactcatcttgtttcgctcatcagtcgtttgaggacactgattcttgccatgattaatgccatgtgacatcggtaagaagcctttcttagaatcttgcatgttgaacctcttcaacaccttgtcaatgtatgtactctggcttaatccaattagcctctttgatctatctctatagatccttatgcccataatatatgctgcttctcctaagtccttcattgaaaaactatttttcaacgatgtcttaacggattcaagcataggaatatcgttcccaatcaataatatgtcatctacatataggattagaaacaccagtgcgctcccactaatcttcttgtatacacaaggctcttcttcatttttgacaaagcccaacgccttgactacttcgtcaaaacgaatattccaactccgagatgcttgcttcaacccataaatggatttctgcaatttgcatatctttttagctgattgtggatcaacaaatcccttgggttatgtcatgtacacatcctcatcgagatttccgttgaggaaagctgttttgacatccatttgccatatctcatagtcgaaataggcagcaatcgctaaaacaatctgaatagattttagcatggcgactggcgaaaaagtttcatcataatcaacaccttgaatttgtctgaaacctttcgccaccaatcgtgccttgtagatgtgaacatttccatctacatatgtctttttcttaaagacccatttgcactcaatggcttttacaccatcaggtggatcaaccaagttccaaacttgattgacatgcatggattctatttcggatttcatggctccaggccatttctcagagtctggtcccaccattgcttcctcgtaggtagtaggttcatcgttgtctaacaacaatatatcacgttgtcctatagttaacaacgcatacctcgcaggtgtacgccgtatcctttcggaccttcgtgaagccggtgcttccacaactggttcaacaacaacttgttcaacctgttgaacaacatcttgctcagcttgttgtggttgtgtggacgttgaagcattttccggtgtttcctgaatttcttcaagtcgcactatgctcccactatcctttcttgaaataaactcttttttcaagaaaacaccgtgtcgggcgacaaacactttgccttcttcccgattatataaataatatcctttcgtttccttaggataccccacaaagaagcatttatttgatttaggtgtgagtttgtccgattgcaaacgttttacatagacctcacagccccaaatctttaggaaagacaagctgggacgcttccctgtccatatctcatatggtgtcttatccactgattttgatggaaccctgtttagtgtgaacgcagctgtctctagagcgtaaccccaaaagcttagcagcagattagtttggctcatcattgatcgcaccatattcaacaatgtacgattcctccgttcagacaccccattccactgaggcgttcctggcggagtgagttgtggaacaattccacacccctttagatgattaccaaattcaaggctcaagtactctccaccatgatcagatcgtaaatacttgattgtcttgcgcaaatgattttgtacctcattctgaaattccttgaacttttcaaaggactcagacttatgcctcattaagtagacataaccatatctactaaagtcatcggtaaaggtaataaagtacccaaaaccacatctggcagttgagctcattggtccacatacatcagtatgtactagtaccaatagttcacttgtcctttcactttgacccgtgaaaggtgcctttgtcattttgccaagtaaacaagattcacatgtctcaaatgattcaaaatctaacgagtgtagaagtccatctctatgaagcttctccatgcgtttctcatttatatgacccaagcgacaatgccatataaaagtgggattcaaatcattaggaccttgcctttttgcattaatgttatagattgaacatccatcaagattcacaatatataagccactcatcatgggtgcatggaaatagaaaatgtcattataatagactgaacaaccattgtccacagatctaaaaccataaccctctgcttgcagacaagaagcagagataacgttcttacacaaagctggaatgcaataacaattatttaactccaaaactaatcctgacggcaaagctaatggcatagtgccgaccgcaacaacatcaactcttgctccattgcccacgcgaatgtccacttcgcctcttgctaagctcctacttcttttcagcccctgcaacgatttgcatatgtgagaactgatccggtaacaaatacccaagaatcagtagaggaagtagcaagattaatttctataacattaatacctgaggtggaactctttccatcctgctgcttctgcttgagctgctctaggtatttcttgcagtttctcttccaatgacctgtcttcttgcaaaagaagcactctgcatccttagcgggccctgtcttttgaaccttggtcttagagttgctagtactcgtgatcccatcatagtttagctttcttttttgaccacttttcttgttgttgggcttgcgcttatgcataaccatcacatggttggagtttttcttaatgctttcctcggcagtcttttgcatttcatgcaattctgccaaggtcttgttcaggttgttcatgttgaaattcattatgaacggctcaaagctgggagggagcgactggagaatcaaatcagtagccaattctcggctaaggggaaagccaagcttatccagactcttggtgtaacccaatcattttgatcacatgtgggctcactagattaccttctgcaagcttgcacgcaaacaaggactttgaggtattaaacctctcagctcttgcttggtcctcaaacatgttacgtagtcccgtgattatcgtatgaacatccaatgccttatattgcctttgaagctcaggggacatagtagcaagcatgagacagattatatcaagataatcattgcatcgttttcatgttccctacgttgagcagcaggagcattgttgggcaagttagctggaaaaggctctgtaagcacaaactcttgtgctcttgcctgagaacaattctcaggttgcgataccaatccatgaagtttgttccagtcaacttctctttctcaagaatagaccgcaagttaaaactggatggtgcaggctgccatgatctacaatagaaatatatgtatacaaaatcagcagcatgtttacatttaacctttcattaaacaatttaacaaaagatactcccactatgtattgtgaaacaaaattccctctagtaacatagtgagtcaagatcctcattttattagtgtctagggagttttggcatcacaattagacaactatcaaagtaggtaagcaacaccttgctaatcacatcatatgtgactcttgtgctgttggggtgacatctccatatccaacccaacctatgtcccaaggttcaaaaccgttttgataaccttgtcaagtaaaccaataatctccgcatacagatgtccgagatctatcctattttatcatgataaaaagtgacactttgctatggcaaacccatcacttatgatcacaaccgtaataggtgcaattattggaagagcataaattacacttaatttttctgagggaatccatcctactatgtcatatcaaatatataacagcaataaagtaagatagatataaaaccccaagcgaaatctgaggggcaacgcacacggcggtcacggggtacatagatctcatctacgattccccatgtgaaaacattaacggcgtaatcaaattatgccgaaaccgagtcaatctcattggctcgtttttctcattggcgtgcggttccagtggacatcggactatccgatgaacacaatcgcgctcggccttggtgagtactagacattccagtgaagtcaccaacacatgtaccgattgatctcatcaacccatgaggctatcggttcatctcatgttccgatcacctaagaactcatatacaacataatagatctcatctactacacccgcatattaactatatgcaatgatctagatcataaactatacaaggcggctctgataccattgttgggatacgcgtaggctacgatagcataaatcaaaattttctatcgtgtaaaccaggaaccatgcaagtattagatcatagatcgttaccactcgacacgctgcgcagcggaagaagacgctgagaagtcgaaggaactctcgcgaagtagcgcgtgtcaatgtagaggaagtagtcgatcgcaccggctcgaccttcccctcctcgtgcgttctcctcgccgtactcccacaccgatcagcaccacaaaccagcggcgcctctaccggtatccacacgtacagggacgaaacgccacgcgcagatgtgctagcacccgcgtgcggctagggttttgctcggggagggaagtgacggctagggtttctcacatgatgcaatgcctctgccggtcacacccctcacgaatatatcggatccatcactcgggcctccaaggccgtaggactcctattcggaaccctatccgaattaagctcatattggatctccatccaatccccttattccggcccattaagcgtgcgaccctgtaggttcatgtatactcggctgtaacccgaaagctccttttcggtccacgcgtcaacagcggcacctagcagaacatattgacccactgggcatacataaagatcatatcggctgaacctctaatgtatacttgtatgaacccctttgcctcacgatatcgattaagctcaaggctagatatgtgcaaccctcttatagctcaatcattcactcgaacctattgatagattatatatcttgtgattgactcctcaatcacctttggcatggtcatggacttccataatctacaacatcgaggggcccagagatatctctccataggaggggcaaatcccatcttgattattcatatcccactacatgtttcatagcatactcaaaaactacttttataactacccaattacggagtagcgtttagcagtccctaagtaagctactacacatgttgggaaccatgataatatcaggtctaaggattcaacaccaacactaaatgagatcactgatgacacaacacatatggctcttgcagtgtctcaagttgggtctatccaataacatgttcactaatatgtgtccacattattaatttggtatctctataccatgatccataagacttgatcatcaattaatacatgtgctgatcatctaaacatattagtaagtcctgtaaaatccatctctgttccatcccagcattcttttcaccactgaaaatacctcttgaccaaagcagcatcctccttaaacccaagcttgtcaagtggactttcaaagtttttggtgcaaacaacatcaagaagccatgcggaattgatccaagaagcctgcacactaaacgaaaacacgtatcagtattccagagtaggaagtaaaaaaaaaagtgaaatggtaaggttggattatttatcagttttgaaacttgtatacaccttatttagacagaacaactaaccataccaaatgatgttgggcagtttgcagcaatgcatactgttggtaacttttttgacaagtcgacaagcacgatcgcaacacctaaagctttgcagtgatagtagagtcgccaaccaccctaatctagcaagcactatatcaagatgggttttgataaactaaaccggctagcagagccgatctagatagaactatagataactacctgtctcgtagataaaacggaaggttttcaggataaacctagaaagaggtgtcgcactctcgcagtaacggcggacgatttacggcgcaaatcgacaatgatggacaaactaagcaaaaaataaaagcaatatgaaaaacgattcgattgattgattattgattgtcttttcacaatgaaccgaccttgtcccttatataggggttggtcttgccctctacaagctctcttccacgtccatctcgggatagaaaccaaaggttcgcctatatctcatactatatcacaaaaccatggttccaaaatgtgtttccaaaaaatacgcgttccctcgaacaattccgcatactcgataaagaccctcccaactaggagaccacttaccgaactccctggatcgagtacccaaaggcaaaattgtcttccgaaccaagtctcccacttgaaacaactttgctttcactcttttgttgtatgctttggccaccctcttcttctctttctctatctcttccaaagccttcaaacgcttgtcgatgacttcatcaagattttatcccgtcaatgtcttctaatcttcacttgacaaatcatcttgcttgatatcccgaagagagccaagatttacctcaaccggtaaaacggcttcttgaccatacactagctcagaaggagtgactttagtggtaccatgtttagatatcctatgtgcccacaatgcttcagaaagcacttcatgccacttatttgggtcttcctcaatcttctttttgactaactttaacaatgtcttattactagactcggcttgtccattagcctgagcgtagtaaggagaagaactcaataacttaataccataagattcagcaaaagtcttcacttccttaggcataaaagaagctccttcatccgtagtcaatgtttcaggacaaatcctctctatcctagcctatcctttgcttggtgtccttggatgaaccggaggaagaattaatcacacacgttcccttggattcgatacccttggaatactccgtagaggaaatgttacatcggtatatccgtgcgcttgcggattctatctgtgatcataagaaatatcaacagggccctgtaccacttggctccactgccgcacgtgtttgttcccatggattttcacaagtgctgccgcaacctcccagagctccatcgagcactcctcccacatgagagggtgtagagagagagagagaggggaagatggaggaaaaaagtgtggtatgggtcccaacgtattttttttgactagaatgcggaatgccatgttagcgaaaaccaccacgatactacgaggggcttgatttacaccgataatgatagttaggggatactctataccgagtgttgcggttgatgggcatgaatgaaactcgaccaatagttgagggatgataagtggactttttttttgcggggaggagcaagagatatattactcaaccaacagatccttactgatatgctgagaaataaagctacaagaatcgcctaaccaaaaacttgagggctggtcagtgcgagctttatgagccaacatatgattaatttggttttgggatctctgtatcttctttataacaatttccctctcaccaagtatcaggcatttgatctccccgaagatatgcaatctttcctttgtcgtatacgcctccgtcaagaacaatatcattagagcaatgtgatgagcacccaacaacgagtaccctaatttatccccctctttcacggtaccaaataaaacagctatcaaattaattcagaaaatatgatgacgatataccaaagcactcagaatctaatccacccgtgctttcacacacgaatagaagaggaggcacacacatgtaccaagcaacaaaaccaggtaagacttcctgatcttgtttcttctccaaccaatcagttatcaggcggcaaaatattcagatagaagctgatgggatcgccaccagctagttcggcagggaccaaaccctaaacatgaactttaggaaaaccaatctgcctcctgttgctaatacctaacatatatgtatacgtgcatgcaagcactagtactggacccaacacaggctcgcaggcccagaccaacaccgactgcaactcaataaacaaattaatatagtgactaaataggcctttacaaaccaggtccaacatatattaaaataatgtggccatgatgcctaatgaccttggctaattatctaggtctaattaaccctcaccatgatgattgatatcatcgattttaattccatctgttggcactggtacactgcatggatcttgaaatattgtttggccttctccagactttataaaaatatgcaaatcaccgactgatattacttgagtagtctagaacatattatccttcccctcttgtaacaaagccatcctcggcttaatattaatttcagccacttctttcttcttcttgacggtgggaaatatctctgctttgatgtcaatatcaagcataggattcaacactagattaacaccatgatgcataaaagaatacggaaaattggaaccatggcattataattttacgccatcctgacccacatgtcattgactcatgtgggttctacatgtcattgagataccgatggcatatcttaaactttgcaaaattaaaatggcatggttccggattcaacacttcattaacaccacgatgcataaaagaatacggaaaattggaaccatgccattgtaattttgcaaaatttgagatatgccatcctgacccacatgtcattgactcatatgggttctacatgtcattgagataccaatggcatatcttaaactttgcaaattataatggcatggttccaatttacccaagaataacagttggatctgccctcatgggtagcattacgatcaaactgccatggcctccccaacaacaactgacaagcattcattggcaccacatcacaatccactttatcaagatagctatcactttatgagtaattttctgtgtgcccgcttgattcatccattgaatataacgtggtggagaaagccttcgtgtagacaaggataaagcatacaccaagtctaaactgatagcattagtgaaactaccaccatcaattattaatttgcaaaccttctcttgaattttgcactctgactgaaaaatattacagcgctgcccctttgcatcaacattagagccatctcgctgaactgcatatgcaagcatagataaaccattattcttttcagcaccatcatccatagatgaatcatcaatatctcgatagcccgtagtaagagtatgatcaagttgtacaccttctgaattttctaatatactctcagaaacatagccttctttagtcatcaacaccttcttctgattaggacaatctctcatataatgtcctctccctccacaagtataacactgtacacttcgtgatttagaactagatgtagcagtagattcaactttagatttggatttactcaccgaactagcagcaggtttagacccatctctagaaggagtagtcagcttgaaagacatcgacttactagcggcacttccatcaccatctcgctgaaaagaacatgaacggctagtgtggcgacttgttagttgctgctccaccctttgagcaatgtgcaccatattttgtatatcataataatatgatatctcaacacgttctttcacatcatcgttgagaccagtaagaaatctagcgatagtagcttcatcattctctgttacccctgtatggctcattaacaattccatctccttataataagcatccacactaagatcaccttgtttgagttgctgcaagcgtgtatacaaggatctagtataatgttcaggaacaaaacggcgagccataacctctttcatatatatattgccaagtatgtggacgaccaacatgtaccaattgattccaccaagataaagcataaccagtgaattcaatagatgcaagacgtgccttcttatcctctaaatagttgtgactattaaagatctgatcacaacgcatctcccactgcaaataatcctccggatctccagaacataaaaaagcaggcatggaaatttttatcttaccaagcccttcatccaacggaacacgagcagcacgacgattccgattgtcacggtgaatatcatcaacaaccctatccataaaagcaggacctcggcgaggaggatgtcgaggacgacgatgatgatcaccttcatcagaacacaagcctagactctcatcctccgcatcatactcatgatgttcaggtagtggacgtcgaccctgtctagcatgttcctgacgtggcagtggtagacgatcgactaacatagaaatactcctctcaagcttcgtgaatttctgatttatacatttatcaaaataatcacaagcactttacaatccatccttaacttcggcaggcaagttagcatcaaaaacaggcatagtaacctcttcctcatcaaaaccatgatgagaaccaccactactttcagaacctccagatttaaccatgatgcaaaatctgaaatttagcaaaataactcaacagtaccgtgatgaaccacgctctgataccacttgatgagcacccaacatcgagtaccctaatttatctctctctttcacggaaccaaataaaacagctatcaaattagttcagaaaatatgatgacgataaaccaaagcactcagaatctaatccacccgtgctttcacacatgaacaggagaggaggcacacacgtaccaagcaacaaaaccaggtaagacttcctgaccttgtttcttctccaaccaatcaggcggcaaaatattcagatagaagctgatgggatcgccaccaggtagtttggcagggaccaaatcctaaatatgaactttaggaaaatcaatctacctcatgttgctaatacctaacatatatggctaatacctaacatatatgtatacgtgcatgcaagcagtagtactagacccaacataggctcgcagggccagacaaacaccgactccaactcaataaacaaattaatgaagtgactaaatagtcctttacaaaccagacccaacatatcttatcttatcttaactaattaaaagattcgtatttttcctttagtcacactattttttggtccgtatgtccgatttgctcccctctcgcgcgtgcgtgcgtgactgctcgggtaaataaaaaatcacatcgcatcttatctggttcggataaggcttgattcccgatacgaaacggatttgctccgaattttaggaaaacggaaagagaagaaaataaggattgaaacccctcaatcaattttagattatctataaggatgcagccggatttcatggtggaggcggtttcaaaagtcgtcgggaaggtgatgatctctggacggaggtaggggacggctatgtgacgatgggcccacacgacagtgagagaagagtaaagggaggtaaattagacttgtgtttgcttactgagccggacgcgtgcttgcgggctaaggtggaggggagaaaaagggataaaagcaggttgctcggatgcgggctgagggaggccatgggctgaaaatggcccagaatgtaagaataattcttatttagatttttatttaaataaatgctgaaatgatgtttgtattattaaaattcgaaatgaagttctaaaaatttctagaaaaatccagaaagtataattaattatggagaacatcattaaaattatatccagccatatcattttattttcacacttactttacttttaaattaatttaaacacctaccaacttaaaaaaatatcaagtatttcggaaaatttatatttaattaattacataatataaatctttttcaacttctcctcaattttctcatctctttttcccgttgcaacgcacgggtattttttctagtatattaaaataatgcggccatgatgcctaatgaccttggctaattatctaggtctaattagccctcaccattgtgattgatatcatcgattttaattccatctgttggcactggtacattgcatggagcttgaaatattctttggccttgtccagacttcataaaaatatgcaaatcaccgactgatattaattgagtagtctgggacatatcacaatggataccaaaaacatcaccaagatgaggcgatgccaaggtaggcgtaatccctgcagacttctcaaacggatcagagtaaaactttatccaaaaccatcttctataggaaacgagagccgccaccccccgatcgcgagggagtcgcccaaaccctaatatcgacaaatgtttcaattattgactggatttttttgcttctcagaataatgcctaatgattagtcttttcctatgtgcccatgaaatccattattgtacgtagtactgatcggccatgcggcacggaaacctgccgtttatttttatggatttagagcaagaggatgagtgttaattatgtgtgatctcaagcactctctggatgagattgtagttgcgggggcagaaccatactccatctatctgatagaaaaccaatatagtaccggatgtaacacatcctagtactataaatctggacatatatttttctagatttattgtactagaatatgtcatatccgatcctagattcgatttttatgggacggagagagtacatatctctctatgcaactaattaagctgcggaaagtgggaaattgttgtggcaaatggcaatcaacacattctgatatacatccattcacactggggattgccaagcattgcgcgggttgtttcaaaaaagaaaaaaaaagaaattaaacaaaatgaaactagttagtaagacgaattgatgtgagacccagtctggagttcgagccaatagataaaaattaagcaccattaatattataaagccaagttatacattattgtagcgtcacaccgtccatcgttaatggaatggaaaatatttcagccttaattgacgtccatcggctaggatagctcagatgagcacagatgccagcaaaaaatggcggcgctagcttacagcatctggagtagcagcagcgtggccagaagaacgtactccctgctgctgctgaagaggggaggaggagcaagtactcctacaacacaagcattggtggcagagctacctgctgcactcttgggctcggcagcagggagaggtggctcaatgacgtccgatgagttgagcaccggcattggtgccagagctggcagcatgccaccagtactgcactccgcatcgagtagctgcgccaggtcgccaattggcacttgcttcatggatgtagacgtaccatctccttggcgtgtacaagtattcactgccagtaaattaattacggtttttgtaaaactttagttccataatatctgggatatattatgtgactacctaaaagaaataaacatatatatttgtggcaaacaatagaataaacgaggactagtacctactttactacttcctccgttccataatataagggattttgacattttgcttatactgtttgaccatttgttttattcaaaaaattttataattattatttattttatttgtgacttactttattatccacggtactttaagcataacttttcgttttttatatttgtataaattttttgaataagacgaatgatcaaacattgaaagtaaaaagtcaaaaattcaaaaagtcaaaatttcttatattatgggatggaggtagtagctagctagcagagtagtagtagtaaacttacttttgtatcttctaacagtcttggggaagtcagttatgaagccatcaacatgaaccaactgaacatagttgttgatctccactgttccatctgcgaagaaatccaccggtggtgatacatactcattgcggaatacctccacatacacagctaaccctgcagactgcacatcttccacaaccttgcttttcctaataataaaacctttgctctcggcaaaaacagattccctgtcaacaataacagcatctgcaaacttcttgatatctgctacgcaggaatcagaaacgtccccaacttttaacgggagcgagtagacaagcttgcattgtgttaacctctgcttcagtttgacgagaacagcactgtctttagactgaatcataatctccttgttgttcttggtagttgggtccatgttgtcatagccagcattactcaacgcagttgttacaagatcaacgacatcaaatcctaatgattttgccataaatgcagcattctgcacttcacaaggttgatcgatcaattttcactgtagatttttgtagaaaggagaaaactaagaaaaaatggctccgtgtgtaagatattttgcttttcatggtgatcaccttaatgaaaataagtgctaaaatctcccccatatacgggtaacagggaaactgttgaaaatgtctactaaaaaaattgccaaaaaaggaattatgatcaccttcatgatgatcatgatgccggataaatccttgtcctttgcatatgtcaaaaagtcggataacttgaaaaactttccttgatttgcgtaccttgggttccttacaaaatcatgatatgggtgggttattttcgctgcagaaaaaaaacacatgaatttttcatgtttgtatgccatctacgtttttttaaagataatgaaaatggattacatatccggtctctgcccgtgggcacacaaccaaacaaattacactcttttcgtgaagaaacatttttctaacacaggagaaaaacaatgttaaaaacatttcaataaaatctgaaagagttgtaataaaaaaatgataaggaaactcacgtctcaaagtgctaatttcttcccaagtgaggttaaacgtgaatattcccggtttagtctgaatttctggaacgacagaagcaagtgagctaaacttcgagttctgaacatctgtactatcatacaggttaatggaactcatgcatataggaattccatctttggtcatttcgatggaacagtcaatgacatctgcaccatctccaactgccttctcataagcaagatccgtacagtccgggtaatctccactagcaccattatgtgagataattaatatattccctgataaaaaacagtgtggtcgataattaaaacgaattcaaacctgtggaattcaaatatcactgcaagaacatatagtgcggggggttgcagctaaatgtgtcataccatgatctgttttcctgcttgtgttcaaattagtgaaacagcctgtgcaaatatagactcaaatgcattaattcccgattcttgtttgtgtacaacaacaatataaacaacaggaaacacaacagtgattgatgactggcgaaaattaagcaatctcgtagctcacatggtagcatatatataaatgaaacaaaaaatgtagagtaaattttacaaaactacacgttttgttgtccaagttaggatgcctcgtctgtgtgactttctacaacttggacaacaaaacgtgtagttttgtgaaatttactcaaaaatgtattactatatgagagcttttacggtgtttgagtgtagagaaggctatcaattctccaatgctcctccaaaagagtagataacacggatttttaaagtacgttaaagacatcatttgcattcgcccactatgcgaatgtgattactaatcaatcaaattgattgatcttagcaaaatttagattcaacacagctttcatgaattgcctgttgagttaattatttgctatggtgaaactgacaaaataacggtgattaaaattacattagtgtaaccaaagcaacaaaagtatggacacataccaatagcctctgatgcagtaagtgggtgatccgttaatacaccatcaacagagaagccaccattgctgacaaatgacagatattcctccaaaggatcataactgtagttatagggaaaaattccatcgtttgaaaaatcagacgcatatatttctaaacctgcatcgtgcgcatctttgacaatctgtgtgggaagctgaatatagttatcactcgtcactggccagatatagcttttgggaaccattataccagaagcaattgtcttaataaatgccaggtcactcagcatagagtcatatgttttgtttgtagaaagatcggaaacagctttatcaagaaagcggaatactagcttcactttatgatcaatgcctcctgatagagtttccaggaaacctagttcaggtgatgagatgtacttcacaaagccaagcttctgtactgaaagaatgtaatttgtcatgttcaaaccatgctctgtgtagaaaacatcatgctgcacaaatgaaaaggaagttatcttaattcggaaagacgtacatgaagcacgatgaatcagtgtaacaacagctagaataatttatacgtttagtccgaaagaacagctagcaaactctacctcaacattcaaccaaagagatgatggctcgatcgaggacatgaagccggtgacagaaaagatgcggaagttgcagaaatcaaatttgtcggtacgagaaaaaagtgcctgtgttactgcccaacggtagatgtgagtactgaattgctgattacaaaaaggatactactaaaggatcatcctagaaaaagaaattaatgaccaaaacagttcgatactatatccaaagaatactaaaaagtgtccacgcaaatcgactccttgttgcaaggatcgatgacatccagttttggccacatgaaaaaccacataaagctaacaagaggatatttcatgataacattgacatggcggtacgttgtgtaaaccattttcattatctacgaaaattgagatggtggaagtatatattcgtgcatgcatgttatggcaatgcagtaagcaaccagctgaaaatgatttgaactcacaaaaaacatttgtcagcaaagacatgttatagtccacagggaaccatccggttttcggcactccattgattctgtatgtctgcttcccccctggataaacttggctgatagtggtgccattctgcataagtaaatctcggaggcaaaagccaacaccgtctttcgtcagttgcacatcgcaccacaagcttgtgtcagtcgaggtagcagacaaggcaaaaccaaaggcgaattggctggaatcaggaaacaatcctgaaaagccacctctagcaataacaagaggagcattacctgcacaaccaacaaatgcttgtaggaaatcacaaggtaattagcttgtgattagcaggttgaaaaaaggacatgaacaataagctagaagcaggtgccgaaaaattttaatttcaggcatgctactgcaagtacagatcgtgctcatggcctttcagacatgggacataattaacagcattcccatcaagatttcctggaaaaccaactcgctgcaataaaccacctagttcagatatcagcattcaggtccttaaaagtcctgacatgaacagagccggaaaatactcctatatagatatcaactacgaggagctagatcgagcttgctattgagtgattaaattttacccgtcaaggttttgaaggtggttgacgcaagcgggagctccgcagcaacggcgacaactacgacgactgagagtagcaggatccagcggtaggacagcattgtggtgagggaactgctaatcctggagaatttttttcatccaaggctcggagaaagcatgcactttggctgagaagtggcgcaagatggcgtttttatagggatcacccagtggcagaacaacaatgacaactcaagcatcatgttaattaacaattaaaaatcacctttggtataaaacaagagttgttggtgaaaattacactatgatcaagtgagagtgagaagtggggattgaaggataaggagagttcttctctgcatttaataactactataagaaatagtgctaacaataattacttagtatcctttttttttctgtctgaatggatcggggagagcaccactggaaagtcgacaacgcagcttcacaggagtaaatatacaacatgcatcctatgatctacaaacatgcaaggcttgttcactatgtttggttatcatactatattggaagaggcaaacaagggaccatatgttgaccattcactcatagatggtttcagtttagggttttaggttaggttgggcactctcaactctggatctgcaggaggaaattaaaaaagaaaacccacaatacttgtatgcatttaaaaaatcaaagaaaaggaaaaaaaaaagagcgagtcaagaggagtggagacttcaaggcaagcaagagactgatcagtttgttttttggtaggtggaatccgaatcttatctgaccacttcttgcttcggtttagccttacctagctaattactccctcctacctataaaaaacgaatctagaactagatataatatattatagtacaataaatttgaacagttatagttttataggaaataaatctagaactagatatgatatatggttgtgcaacgaatctggagatttgtaagactaggatccaatcctatagctaggtttgtttttattggacgaatagagtacatatgctatatatagttacctagaggtctgtctccttagtcctcacctagtagtaggtcggttaggttctggtcagctctacatggcaccagcgtagagctgcgctgctgccgccggggaccaacgaaggaatgctccggcgaggcaggcgagtgaacttgccagttttgcagcagcgcttggcagaagacggcgaaaggatttttgggcaggcccaagaatggactggagttggaggttggcagaaatgggccctataaaattcatgtggaataagttcactttgggtccctctatttgttcctagtccgattttcgtcccttggtcgcaaaaccgggtacgacgggttccccaacttacaaaaccacacaaaagagatcccttggcagtattatatccggttttggatggcgtggcacatacgtggctccctttgactaggttctcatcccatgcggcattgacatcgcgcttacctgacaattggatctcggaaaataataaaaaaccgtgggacccacatgtcagctacacaaaaataataatagaaaaggtgggacccatgtggtcccacatgtcagcctccctcttctctctatcccctttctctctctcccctacatggcaaggagaagggcgagcgacggcgcagagggggtgacgggcgatgggcggagcgacgacgggcgacgttcggtgtgcggaaggacggagggcaaaggggcggcgggcggtgggcggaaggaaagcgggcggcgggcggagcagaggggccgcgggtggaagtggagcggtggcgggcggtgggtggagggacggcgccacggcggtgggagggcggaaaaggagcggcggctcgccgccctgcctcgctcgcccgttctcgacatcgatgccgcatctccgcccctcctcgtccgctagggctcactcgcaggcacagctggcgtcgaccctgctgccctcgccgccttccccactcgcgccttctcctcctccgtcgccgccgctggtggttgctgcgtcgccccgacgaacgcgcgcggccatccttcctcacaggccgacaagcacgcgtcctccgcttccttcctccctatcgaggtccgccaccagcgtcatgcccttcagcgactccacaaacggcgggtgcttcggtggtagcgccacctccacgaactgctcctccaacatcagcgtcaggaagccagcgccgcggtggatggcgtgagagaggacggatgccgaggaggcgttggagacatcgacgcgaagctcatgggactcgccgctggcgcggccctccgccctcctcccgcgcgcctccactttcttcctcgccgcctgttgtcgttccgcccatcgcccgccgccactccacttcgacctaccgcccctctgctctgccctccgcccgcatgttgctccacccaccgcccgctgccgctcacccttctccttgccgtgtaggggagagagagaaataggggataatgagaagagggaggctgacatgtgggaccacaagggtcccacctttttttattatttttgtgtagcatgtgggtcccactatttttttttattttcccaggattcaattgccacgtaaacgccacgtcaatgccacgtgggacgaagacctagtcaaagggagccacgtaggcgccacgtcatccaaacccaagcacaatactgtcgagggacctcttttgtatggttttgtaagttggaggactcgtcgtacccggttttgcaaccaagggacgaaaatcggactgggcgacaaatagagggacccaatgtgaacatattccaattcatgttggtgcatgcctgtataggaataagtctattttgcttctcttatctcttactgttgattaaatcgcatccctcacaaaaccgggtataatatctcctccatcttagaaaaccgatgcaaatcgactccttcagcggtttgcgaagtgggttttacgacgtgacagggtggccgggatttgactcactgattcagtggtgggacccacatatcattgagtcctcggtcatcttcttcctcaccctttctctctctctcctctcctccctttctcactcctgcttcatctgctccgacaatatcggtggccatcgtttgtcctagcgcggccacaactgctcttcatcgtcgcgacaccgcgtacgcgccgccgtccgttcgtggtcctcctgtggccgcatccgcttgttgtcgctgtcccgctgagtctggccgactctagataagagctcatgggacaacatgttgatcctcttcctgaattaatgaaatcgatggcatcccctccaattagcaacttaattactagcaaggaaagaagaaatacatcatgcattttccagaaaaatagagataagagtcacatgcgaagggccgatgtgttaggaagggcccctttgaatttttcttttacaagaacaattgtagggaaaaacttgcaagattggcttgacattgtttcaaaggtggtgagtgacaatttgaatgataagcaagaccaattcttttgcaagagcaataaaaaaatgttttatgttaactccatgtataaagctcttatgtttaatgttgtaatacactactacaaaaaggtaaataggtgtcgccactataggtgccggtacaccaaaaaacggcaccaataatgctttccccgcccatgcacccacctccacacgccacatattaaaaaacggcacctttaatcttctacctaccacactgctgttggtgggccccgcacataggtgccggttttaagacaaaggtgccggttttttaaaaaccgacacctataataaattaaaggtgccggttttgggtaaaaaaccgacacctttacagatcgagccgagccggctgagccgaccggcgggccccacaaccatcggataaggtcgtctcgctcagcctctcctctctcgtatcgctctcttctctctctctctcccttctctctcgcctcgctctcttctctctctctccctcctctcccgcgcgctgccgcggaggcggaggcggcgacttggcagccggaggggagccctcccctccgtcagatccggcgggaggggaggcggcggcggcaggagggggaggcggcggcgggagatagcggcagcagcaggcggcgccgggaggagaggcgacagcggcgggcggcgccctcccctctgctagatctggcgggagaggaggtggtgttgccgcatcggcggccccatggcggaagagtcggcggcggtggtccgacggcccggtggctgcgccctcccctccaccagatctggcgggaggggaggtggcggcggcggctcggcggcgggaggtggcgacggtggcttcatcggcagcggtggtggcggcgcctcgtcctctccatccggctcctcctccttctcgtctccaatttattcttgatgaatgtgtttgattcttgatgaatgtgtgttcttgatgaatgtgttcttgatgaatgtgatgttgatgtgtttgattgatgaatttgaggaaattttgggatttgggtgtagatgggatcggcttgacggctcaatgcatcggctcgatgcattgagccgattttttttggcttatgggcacctcaaaggtgccagttccaaaaccggcaaacagtgccggttgggttaacagtgccgcctcctgggtgccggttgggaaaaccggcaccgaaggtgggttcccaaccggcaccgtttagagattatgtagtagtgatacctaggaagtctttaatttgaaagctaaggattcctttaaaaattaaaattttcctttggtatattgaaaagggttgattctaacaaaagataatcttgctaaaagaagatggaagggtagcttgctttgtaggttttgtaactctaatgagtcaattcaacatcttttctgtgattgtgtaatggctagatatatttggagtgtgatatgtcttacttttagaatcaagcaaccccgtaatagttcacacttgtttggaaattggttaagaggttttgaacctaaacttaaaaaacaaacttgggtggacatagtggtgatttgttgggctttgtagttcagtaggaatgacttagggtgagtttgaggagaaggagattgggaagatacataaaacgaggtgagccattagggcatgatgaattgagtattaactattttaaattttaaaaatagattaatataattttttaaagcaagtttcctatagaaatttttttgcaaaaaacgcaccgttcggtagtttggaaagcgtgcgcgcggaaaacgaagtgctttctcacctcatctcacacgaacgaacgtagccttaggctttaatggatacaaccacgtacatgttagtcgtggtggtttcgtgatcccatcgatcgagcgatggattaaaccagcacttgaactacgtacattgattgatcaggatcatcccacatgtatgatcactatcataagggcatgtacaatggttgtcaataatggtttcttagtgttgctaattaggaatacttgttgacatggaagaaagagaaagaggatgttatgtatcactgtaatatagaaatatagttgcatgaggataaaaaaatgaaaagaatattaacaaaatgaatatttttttgagttaatgattagagcctgtctcaactattgtaaagacacgtctctaaataatcttatattgtttaagagatcatactcgtctctacaactgaacatgtcgaggtcatcttcctttctaaatatatcaatctactgcaagcaaataacactaacccacaaggacaatcgaactcttattgtcaaggttgtagccttgtagaaactgttccaccactggccgggtgttcgatcacagtcgagacgcaccggagtcaatagcatggatgacgagcagctgagcagctctgtccggacggcagcggtcaccggagcgtgctcccgttgtatccgagcggactgcatgccgccccgaacgcagggaggatgggtgacagcggaggccggagaggcggaaaagcctcgaattttcgtagcatagaagcacttccctgtccctagttgtgagtaatcttttttgggctcaactggaatgataaaatttttgaattttacccatgccatgctacattacagtacaagctgtaggctagtccttctgtcagaaatgcccaacattttagctctttctgcctcaacaaggaagaacttattgattgttttgtgaaaacaatcctaaaaagaagatatttctcaccattttctatttaaatattattaaataataagaatatctctcatattttaaaaaaacactttgaccgagtaacatataaattctaaattctcctattgtcaatattatttattatgctttaaaagttaagtgaactgcctatgtaccaataaaataaacataatatatcactaatacattaaaatattcattacttaggcttcatgtctcacttatttctaaagtcacatataaatattgtaaaatactaccacttctctctattaatgggatagcaccattaaagttaaacataaatgttactctcatgggtgaaactgatcatagatgccaagactttctttctctgttgccttgaaacatgaatctcacatctatgtagccatgctcctcaaaaccagcttcgagcattttaatgcctaattcattatcacatgctcatggagtatttcaccggtaaggaggaagttgatcactacttcctccgtttcacaatgtaagtcattctagcatttcccacattcatatatatgtctagattcattaacatcaatatgaatatgggatatgaatatgggaaatgttaaaatgacttacattgtgaaacaggggagtattagcgatggtggccttcactgggaccgccttaacttagccagaagttccatgctaaacttacagtaatcgtagtatatatactctattgtccatgttcagtgcacttacgggatggacaaagagaatggaggtgaccaaagttgtttttttttaaatgctttgagtaaatttgtggtataatgtggacacaatttatttatagtgttcatcattactactcaaaattttatgttgtagagagaatactctcttttaaaaatgagcgaggctaatcatttgtagatatttaaaaaaatactatcgctaaagagatacataacaccacgataatatccagagcaccatattatcgtttatattttgataaatatctatagtttagcacctaatttattttgaacacctattgtttataatcatatgagacacttttactaatttaaggaatgtttatttttccaaacttatttacatcaactagtatattggagtacacttatagtcatgtcaacggagtttatgacatatacacatcaattatgtctgacatattgaaattccttaagtataagaaaatatatcatgagtatttcattgtgtatgttacttcattgttcaattgtgtcaaaactatttggcaaggaaaaaaatatatgatcatgaatctcatgatggattaaggggttggattatagaaagatcattggttggaaatatttttgatatttttttcatatctatgtgctatgctgctcacttctcaaatatcaatcaaatagttatgaaaatatataaaaaaactttgagaatcttaatgtcaaataaattataatttattcagatatacttgaaaaacaaaattaagttgtgtagttttcatttttaatatatagatttaaattagtgttgtatatttgttaaatgatgttcacaccctaaaatatgatatgattttttcaaaaattatcatacaactgtattatatatttatctcatgtattgtgatgtatttaggaccaaaatataacttctttaatttaactaaagtaatataacatgatcacaaattggatatataatttaaaaataatttagaagatggtttaaagatcattgacgtgatattttgtatttttattatatatcttaatttaactatatatgcatatatatttgtgaagtaatatattttataaaatcatattttaaagaccgtccgatttttatggatatatgttttttggctgtcttttttatctacattcatatggttctttcttcccttccagtgaacagttggtaatctttgttgttctattttcaatggtgcgtacatatgtacgggagaacagtagagcatttatatggtataataagaggaagttattagtttttaataatatagatctaatctaatggtgtgaaataacgggtccaccaatttaagtgaaaatcgacggtgatattaaatagtgccatgtggtggcttatgagagcgcctgtaggagggcgatgcggtgacttaagagcgttcttaagaagtttaatggacttttagtatataatagataggatatatatcttccccacaatgtcataggtagtggaccgaggggtcaaggctctagggataaggatagagtcggttggataagattagactgggtcctccctccatctatataagaatgggttgcatcgtcattctaattaagcaatgaattgaatcagaattagtcttgtccagcctaagtctccctctcatccctagcagccgttgccgcccggctatcctcccggtggtgtttacccgctatagaccctaacccattacaacttggtattgaagttatggttgttgatgatattatatatcgaagatcctagagactactgcatctggctcctcgaacgaatgcaggccgtcctggcaattctagtagcctcaagagaggtagagcatgcaccgaacgggaaggaagagaagcgcactgagcaaaagggggttgtgggcatggctatatatgttttccctggccgtaacaccgtcgtcttttccctctctgccggagatcatccactcaagggaagcggtggtggtggcgcatccagcgcagctgtcaccatgggaggccatcacgcagcaccgtcgaccatcatccttgcgaccacctcggcatatgtattcaagaggagggtgagcttcccgcggcagccgaaggaagcagtacctgttttccctctggagggatattccgctttggacagggccacttctaagcgaccctcaacctcgttgctggccctggcaacggcggcggcgctattgcgggggttcctagtgcgcgctcacgcgccaactcaataagtagcgcgcacgcggacgttcgcgttgtcctagccggtaattacggtaattagcggtaattatagtaattagcattttaaaaatatataaataatttatttaggtagtagttttaaaatacagttgaaagttttaaattttagttgaaagctttcaaattttgagttgaaagtttttaaatttaaagttgaacatttttttaatttggagttgaaagttttcaaatttgtgatgaaagttttgaaattttgagttgaaaatttttgaaattcaagttgaaaagtttcaaatgtttgagttgaatgttttaaattttgactagaaaattttcaaaatttaagttgaaagtttttgaaatttgaattgaaagttttcaaaacttgcgttgaaagttttcagaatttgaattgaaagtttgaaattgatctaaaaatttcgaaatttgagttaaattttttaaaattttgaatttgagttgaatgttttaaattttggatataattttttcaatttttcagtgaaagccttaaatgatattgtactagtaaaaaaaacaactaaacgtgatacgcctaattaccaaagaaacgaaaataaatcaaaacaaatgatgttaactgtgtctaattatgtgttaatcactttttaactaatgtaccctataatcaccaactacacacctataaaacctcattcatcaaatccgatggtccagaatcatccgatccaacgcctcataatcgtcgcgcctccgctcgcgctcctcacgcgtgtcctcctctcccctttcctcatgcgcatccccccaatcacgcaccccgtgtccccgcatctgccgtcgcctatcgccatcgcgtcgcgcgcctcgctccatcgcttctccctcctccgcccacgcccccgtcaatctcctcgcgcttcaccacccccatcttctcctgccttgctagtatcctccgtcacaagagggcttagggcgacccggcggcgcatgggcctcctccgggggcgcccccgatctccgctgccttttctcccgcctcgcaggtatcctccaacacaagagggctgagggtgagcacgacggcgcatggtgtgctgagggtgagtgcagctgacgatggcacacaacaaacccatccggctgtacggtgtcttcccccaaaccctaaattttccccatctctttctacaatccatctaggaattttcagattggggattttgtctttgcctgtcatgtctgtacaaatgagaacactaggacaaacaacatgttgtatacatgctgggatgcctgaatatatggttccttatgatggaatcagaaaatgataagttcttcagtaatttcaaatgcgaaagctgttttagaatttgataatgttggctcatgatgacaacaactctgtacatggacattctgcaggtagataattttttcttgatggaagcatgttaagacttgttacatgtgaaacttttgctcatgccaccatttgttgcataataggttggctccattgctatcaataatggaataatccttctcaaccacatctcactaattcttcggctccactttagggggaaatttaatatgctgatctcctttatttattaaatcaggcaattttttatgctgctgtacatatctatctatctatctatctatctatctatctatctatctatacctatactaattgggcactttctcggagcttccacgttaatcagattaatctggccattgattaactagatcgtaaaatcatgaccatagattaaatattataaccatggacttttaattaaaggcccatcgagagaaacatgtatctgggccaccatttaatctatatcggcttccttcaaagtctacaaactgtgtccatgtcgatctcagccaccggactcgactccacacacgacaagatgacgatacgacaggctatacgtcgatctccttcacaccctgctgccgatgagctccatcgaccgatctccagttcactattttatcgatgcagatgctattcagattgatctttgcagctatgattgctattttaaatactcaagcaagcaagatctaattcaatctatttagggtttcagtaagtattttttacatgcttctcatctattctaaactatgtataaatttcagattttaaggtatcgcaatttgatagccataaatttggatggagtttatcaggtatattcatttacttctaagttaaattctcccacatccttcataagcaaccaataggctttactgcgtatctttttcttgacatgaataatttactgtgtatttaattatttatttggttccacgcgtaaaacagctacataatattttgacaagtttgtctaggtcaggtatgcttacaaacaagggaacgtagctgctgcccctatctatttatgaataagaaacaaacaagcacttactttaatgtttctctttttatatttacagatgttaatttgcattatctatgtcaggtgtaattagcaattgtcgatgatgtgggctattcttttaaccaagatgacaagataagttaaacatacatcactaacaaatctgctccatatatgcttcatccaaatatatttgtttcagtgaatgtatgatttcatcaaaaattcaatttagcagactaataaggagttagaatgcatgatttctaactaggagtagttatgccttttgtcagttttaaggactatttgatctgaattatgtctactgtaatgatgtgggccacttttacaacacaccgatgatgtaaaagtgccactaaaattcatgcatctagcgtattataccaaattaggagaccaacacaaggacaaacaggtaccagttaattcctaaattcataaatattaaattatagaaataactgatacttctgatcaagtgtagcgatatatattagttactttcaaattttgatacttttaaatcatgaaagaactactattgattcgaaaatttggaacaatttttaaatcatgataaaaaaaaataagatttcaaaccgagtataatatttttagttacgaattttaaaatcaaattataaagatgttataattgagactccacacaaaatacaacttgatatttaataattatgaatataggaatcattaaatcatgaaaaagcttaactccaaactaattttatttctgtacttattaattgaaaattgctaaattattttatagcaaatgctaacaagagcaacaaaacgagtataaatctatatttctaatattgaaattttaaattatgtaattttgaaaaaaataaagttagaatggattatatatgaaattactaattaagattttggcaattgtcagcttcattcaaagtaacatattttatcattatccattgaaattaataatattttaattattaatcacagtaacccgtgcaacgcacgggttgacggctagttgctactaattgatcctaatgacagtagatagaaagggatgtgtaaattttggccccttttttgacatcttttgtttttctttggtagtatctaggctgcagcatgaaagcaaccagatgtagtggtgttccttttcttttggactgctagaagttcatgttgttattttaatacttcaatattgtgctgagctatttttttgtttaattggaaatttggatcagaaacatcttacacataggtacttctatatcatttacatttgagataattatgggattagaaatatggaatatgacatgttatatttcttctaataaatatcttccataaatggctagattaagacggcattttgcattcaattttgtgatagcaaaatataagttatatgtaggtatggaactatatattttcagacaactcagaatcctctgcacttcccgttcttgttctgctctctttttttttttagaagggtacaactcaggacgcacactcacacacaccacactcacaccacaacacacgcacacacacgcgtgcgcgtccttaacacacactaggaatgagattggagaccattctgctcttgcagcaatgattggtgccgacgcagggagcggggcaggcatgtcgaggccacggttgcgaactttggcagtttgattattggtacgtggtagctcataccgtgcttgtctaaatatgctaaatttgccttgcaagcttgttcaattaattctaaccgctatgctttcatttctgcgaatgaaatttaacatgttatctgccatcctatggaccctgatgactcggtgttgtattacattctagagtaacacattttgttagctttagctatagtattttactagcccaaaagtcaaaaccgattgattttccaaaactgaatcattcttagctttcttttattgctggattggatccaacattcagttggtcatgttagtggtttagttccaagtttaattaatcactagaaatttatctaccattcaatttggatattttagtggtcgaattgatgaaattgaaggtgctgttggcatcaataccactctttacaatcactatcaaattccataaatccgtttcagcttatttatcctcttcttgctattccccttatttcagagaccagtttgatcaaatgtttgattgtgccaggattggtcagagcagagagagaaggcaggaggagagggtaaagaaagcagtaacagtaggtacatccgtatatgcgtgtgcttttgaggagatgagggttgaagtggaaggtccaagaggtagaggcagccactggaataatgtacaagcaatttcagaatgtcaggttctgctggttgttttcttattttcttgtggccttttaactttactgtttaaagctacttaaaagacattattcttgattcttttgtgctacatggtgatgcactcccgggggccttcaaccaccatgaaacaacccttgctggtgattggtgcgtgagaagactggcattctcttgattagttataaactgtgcatgtgtttgttctccatggcgatgcagcatgttgtcaaaattatattgttatgtaacatagaagagtgatattcccatgattatttcctggttcaattcaggtgttcaaggacatgactttcctgttgagcatagctagctacaggcccaaccttttgagaagttcattggtacaaccaaaatgactctttgaggagtctgtttttgtcaacaagctccagtggatcctaaacagtaaacaagcaatccggaagacggtagcggtccaatttttctttctcggcgggtacttttgaaattaaagtgattaattagttctttctccactctcaataataggttattcgaactatgtataattcacatctgtattatattttgtgtcatgggtgatgggtttgtcttattgattgtaattatgtcgaaaatcttttggagattgaattggtgtgcagaaaaccttgcaacaagagaatgcatcaatggagtactagacgtatcgtcttttgcttgtcataaccctttttaatttacctcttgcataagatgggcacatgtttaattaacttataatagagaacatgctctttggctgataactgtgtgctttcactattttgagagaccttttatgcatttttagtctacggtaatcatgtattcccttcatacataaatataatagattctattattggttgtttagcatagattaaggttgaggtcaaattattctgatgacctttagactttatttgattggaaaagatcatgtcaaacgatgcaactaaaagtgtacaataaaagagttgttggatatattggaaaaacaatactctgaaattcattatacttgtgaaaatagagagtatcaaaatctcttatatttgtgaatggagggagtgctttataatgttggttacttcacaatcctttttaatcatttcaatacatcataaatttaggtttataatataccttgctctaatttttcaatgtggttatttgtaacctatgtcatatatacactcaatttaatttttgtacgtatattaccaaatattacggtcagaccgggcaccggtcagaccagcggtacagaagcggtcagaccggccctcagtcagactggcttcagaggaatttttctgaaaattctaaaattgattttgcacgtggatatatgcctattggatcttctggtcgtgtgtcttagtactggattcctaaatttttactatcatctaaccccagtactgaggcttcgacttctgcttgtgtgtaggctttggtggcaaggaagaaaaacgtgtggatcgtggattccggttgttcgcggcacatgaccggtgataactgaatcaattatctttggtgatgctgctacaagtgccgttctcgctacaggtttggttaaggtaaatgaaaaatttgaattgaagaatgtagctttggttgaggacttaaagtacaatttgctttcagtttcacaaattgttgatgaaaattttgaggttcactttaagaaaactagaagtaaagtttttgattcttgtggtgattctgtgttgaatatttctcactatagaagagtgtttaaagctgattttgaaaatcctgtttcacctctgataacatgttttgttgctaagtttgataaaaatgtgatgttttggtatcgtagacttggacatgttggttttgatcatctcactaggttaagtggtttggatcttgttcgtggtttgcctaaacttaagaaagatgttgatttggtttgtacaccgtgtcgtcatgctaagatggtttctacttcacatgctcctattgtttctgtgatgacggatgcaccgggacagctattacacatggatactgttggtccggctagagtgcaatctgttggagggaagtggtatgtgttggttattgttgacgatttttctcgatattcttgggttttctttatggcaactaaggacgaagctttccaacactttcgtggtttgtttcttcgattggatcttgaatttcctggttctttgaaaaaatttgaagtgataatggtggtgagtttaaaaatgcttcatttgaacaattttgcaacgaaagaggtcttgatcatgaattttcttctcctcgtgttcctcaacaaaacggtgttgttgaaaggaaaaatcgtgttttggttgaaatggctagaacgatgttggatgagtataaaactcctagaaaattttgggctgaggcaattaacactgcttgttatatttcaaatcgagttttcttgagatctaaacttggaaaaacttcttatgaacttcgatttggacatcaacccaaagtttcacatttgcgtgtttttggttgcaagtgctttgtcttgaaatctggaaattaggataagtttgaggcacgctctaccgatggattgtttcttagttaccccgcatatactcgtggctatcgtgtacttattttggggactaacaaaatagttgagacttgcgaagtttcttttgatgaggctagtctaggtactagacccgacattgtaggtacactatcacaggttcagggggaggatggtcgtatttttgaagacgagagcaacaacgacaacgacgacgacgaggtcggctcggccggtcagaccgggcgccaggccggtcagaccgccggcacacctccggtcagacctgcccatgaggagcggtcagaccggccagggtcgtcggctgagggttctattgatgctgttcgagatggtcctccgaaaattactacttcgaccagtactgatacagaacgtggatcaacttcagaagttgctgctcctttgcacattcaacgacgacatccaccggaacaaattattggtaatataggtgagcgaactacaaggtctaaggtaacgactcatgatgtttgtgcaaattctgcatttgttgcttcttttgaacccaaagatgtgtcacatgcattaactgatgaatcgtggattaacgccatgcatgaagaacttgaaaattttgagagaaacaaagtttggactttagttgaaccaccttctggacataatattattggaaccaagtgggttttcaaaaataaacaaaatgaggatggtttggttgtgagaaataaagctagacttgttgctcaaggttttactcaagttgagggattggattttgatgaaacttttgctcctattgctagaattgaggcaattagacttttgttgacttttgctgcttcaaaaggttttaaattgtatcaaatggatgtgaaaagtgcttttctaaatggttttatacaggaggaagtttatgtcaaacaaccaccaggttttgaaaatccagattttcccaaccatatttttaaattgtctaaagctttgtatggcttgaaacaagctcctagagcatggtatgataggcttaagaactttttgcttgcgaaaggttttacaatgggaaaggttgacaaaacgctttttgttcttaagcatggtgataatcaactttttgttcagatttatgtggatgatatcatctttggttgttcgactcacgctttggttgtagattttgctgagattatgcgcagggaatttgagatgagcatgatgggtgagttatcatactttttgggattgcaaattaagcaaacacctcaaggtacttttgtgcatcaaacgaaggatatgaaggatcttttgagacgattcaagatggagaattgcaagccaatttcaacaccaattggttctacagctgtgttggatcctgatgaagatggtgaagttgttgatcaaaaggagtatagaagtatgattggatctttgttatatctaactgcttctaggccagacatacaatttgctgtgtgtttgtgtgcgcgctttcaagcttctcctcgtgcttcacatcgtcaagtggtcaagcgaataatgaggtatttgaatcatacacttgagtttggaatttgatattctactttatcttctatatgcttaagtggatattccgatgctgattttggtggttgtagaattgataggaaaagtactagtggaacatgtcattttcttggtacatcattgattgcatggtcttctaggaaacaatctagtgttgctcaatcaactgctgaatctgaatatgttgctgctgctagttgttgttcacagattctttggcttttgtctactttgaaagattatggtcttacttttgagaaagtacctctcatttgtgataatactagtgctgttaacattgctaagaatcctgttcaacactcacgcacaaaacatattgatatccgttttcactttttgagggatcatgttgagaaaggaaatgttgaattgtagtttttggacactaagttgcaaattgctgattttttcactaaacctttggattctaatcgctttgcttttcttcgtggcgaattgggcataattcatccttttggcatggtttgagggggagtttgtacctcatggttttatcaagcaataatatgacaatggaaaaattgagaaaatagagctttgtatatacatatggtattttcttgtgcatgctagcaatactagtctatacttgagaaagtttatttgtctctagtatagcttgtatgtattctagtcttttcatgagatttagattttgcttttaagggagatgatgcatgacacttaaattctatacttgaattaagcaaatatgtaatgttgatgctagcatatggtttgatttataaatgctctatatatatgctttattgaattgttattcctcaaatagctttaattgctcattgtgaataagagaatataaaatatgaaaaaaatgaataccgaatccttggaaacagtctttgtgacaaggacgtattcgatgtgagaaaaataatgggtgctgaatccctgaaaacagtcttgacgacagggacgtacctggaataaaagagaaaaatatgagcaaattagtagagatcggcacatctatgacgatctacttttgtcatggaagatgcgataatcgtcataaagtaacatctatgacgaacttatgatttcgtcatagaactcgcgtcacataagtttctctatgacgaaacggtagatttcggcatagaaatgcttctatccatgacgaaggtgctcgtcacagaattgctttccagctggctagtgacatgcgttgtccaagccacgtggctgccatacgtggaatccacgtttgatgtgacgtggcagatgacgtgtactccatgttggatcagcatctccagtatactagagccacgtggcagtcatatttaatcccacgtgttggcatttcatatgtccacgtggcgctacacgctaacgccacgtggctgaaggtggtggcaccacgtgttctcattttgaggcgccacgtgtctgtatctgattaatgacacgtgtctttaccgatacagacacgtgttaaacacattagggatgaaggcccactcatttgtcccagcccaacccatttgtccacacattttacatctagttgtcgcccagcccactatttggtctagaaaatttttagcattggcccatttggagcaacaattagaacttcacagcacattacaaataggcccaacatcaacattgaacacagataccaacttcacagagcaccatattacaaataagttcacagaacctagtacacataacttcacatttaagtccacaaaagtttaccacaggatgataattgagtccaccatagcaccaaacatcattttacataaccaagtccaccacacgacagtaagctcatagaagcatcaacacaactaaaataagtagatggagttcatcacagtgcacaagataataaaggagactaggacagcttatatcaacacctgacaatcaaatgaaaccaagtttcagattatatcaacaccaaatttcttattctccaaatcagatacagctgaatgataattcaggatcaattatttttctaacctgcccgagggtgatggggaggagcccagcaacctgatagtacaataccatatgttagattattttttttatgcgctagagaaacaacaagaaacaatcgacagatacgatattagtttttgaatgaaagggctactttgcaacactaatctgatgtccccataatatattgcactaacagaactcaatgtccccatccccaacccacctcatttcactggccaagcaaacaagcaatgtcacaccctgaaaatcataaatatataaattgttgtttaaatggaatttttagaaataattttaaaagtcttgaaaagaaaatctaattttaattaataaattccaatataaaatgggcccagataaaatttcattaaatactttgcttaattctataattcctagatttttctgggatttatttgagctaagaaagtatttttaataaatggaattgcatttaagaaataattttaattgaaaaaggttttaaaaagtcttcttttggctttgggccgaaagtcggcccaaaacctctcttctctctcctcggcccagccggcccagttagccgccgcgcgcgcgcgccctcgctcgctgacaggtggggtccacctgtcggacccttcgtcttccttcggccgccgccgccgaaaccctagtttcgcgccgccgccgtctccttccaaatccggccgctcctttccttctccggccgaattgatagaggggaaatgatcctcgggatctcctctaccttttctcctttggaaacatcggctaaatcgttttggaagttcgtggaatcgagttcgattcggatcggcctctttccttcaagccgcgggctttcctttcgtcgccggtcgccgtgggccttcgccgccgcctccgagcccctttaaaaggacccccggtgtctcctctacccgtcgccaccctcgccttcgcctctcgtcgccggaatcgctctagcgccgtgtgccctagcttcgccgtcgccgccgccgctccagccgtgcgccgccgtcgtttcagccgtcgccgttgctcgggaaggacgtcatcgtggtcgccaagtcgtcgccgtcctcgtccgccccttcgccgtcgccggagatcgccggagcctcgtcgccgtcgtcaacccgaaggtttccgccgtttcctcctcgtcgccgtcgtcgtccgttgttcttccgccgccgttttggtcaccggtgtgttcgccgcgtcgtcctctacgtgctggtggcctccgtttgcgtcctcgcgccgccgttcgccggcgagcgtgcgccgcccgagccgtccgctccgccgagccgccgccgctgccggtgacgtcattgccgacgtcatcggggtcgtccgccgtgagccggtcgtggaccgttcgatctcggccgtccgttttggattggatcgatctcggccgtccgttcgcgtgaaccgccgcccgtgcgcccggtccaccaaaaccctagcccgctgacgcaataaaccttcttttccttttcaaaaataattcattattgcgtcataattcaattttaaccgatttaagtgttttaatccgatttaatcttcaaaaattcataactaattcatcttagctccgatttagttggttcaagtctctaaatttttctaaaattgagatctacacattaaaaatatccacatgtactgttcatgcttgtttatgtgctgttttggtgattttgctcttttctgcttagattccgtcgtttccggagagtccgttttcgccggagaagagtttgaagagttccaaggccagcaaggcaagtcacacagatcccaaacaatcctttgagcatgttgatcctatttaaagctattatttcttttcaactattgcatttattttcgaatgtcattgggtggaattaacctattgtttgttatagcccttttgttcttgattactttattccttgataccttgggttattataatttgactagttgagctttatttatattggttcaactagatattagatataattgcttagccctgcttagaaacattagcacactattgggataacttatgactcactattatttcatgatggcttaatgatagttcacgatggacaatcgtgattagttaattaattaatgtgccaactaaaacctgataatggtgggttgtgagcacatggtttcgatggtcgtgctcatgacaattaaggaccggttcacgagtttcggttgtgaaacattaatcgtgccaaccacaagccagcatgggcaacggctttatcttttgtatagcatggttcattgcggggcaccagactgagaagtggcggagataagcccacgggggtcgctggggagtccatgccttgtttataagggggtgattatgatccaggaaggtgcgctgcagtggattgtgttatgcgaggggtattgtcacaactcctttccgaggtaccgtggtggtattgaggcacatggtgacatgatgtggggttgtcttgtgggtacagtggtacacctctgatcagagtaaaactattcgaatagccgtgcccgcggttatgggcgggtctaacaatgtctttcgtgattagtcccacacttctcaccatagtaaatgaagctataattggtaataatttgattagctcctggtttggaatggtacattcctggtttggagatagaactgtgcagccgggatggttgttcagaatggatgggcctatacaacagggtatgttgtatagtgttggattaatattgcttaattaatacttaactgttttattaaattctcaaatgtttgctaaatgctacttttgcaaatgaaaccctattatgccatcctttgttatcctgtgcacttgcatatctgctgcgtggcttgctgagtatgtcatatactcaccttgcaatcattcatcagaggaagagttctacaatgaggctgatggtgtggaggattaggtgtagccttggtcaagctgcctgtggagtggagccgtctgcgccgtttatttattttccgctgcttagatctttattgattgagaggaactatctacctctgtaatgacattttattcgcttattaattagagtaataattgtactctattatcaatttgttattgtgtgcctcggctgattcctggacgagggttcacacacatgtaagcgtttggaattttggatagaaattccgggcgtgacaagttggtatcagagcccccttgaccctaggttatgccaaatggttacccatagaagccctctaaaaatattggaaaagtagaactgttctcctccctttctcttttaattaaaccaaactaatggcacatgcacttcataatctcttttaatggttctcattcaaaatttattccagtgttattagtactgtacatctattactgtactaatggctcatttaccagcaaaagttttacaatgttgttttatttaatcttgctgcaataaaataaatttagcatgttgattttataactttcttttgaaaccagctattcaaaagtacaaaatttgtaacttggtttccaactatttcaacttatcttgcaagtttggtttactttatttacttaccttttactttgaatttctaaactttattcaaattaatccaaaaacttgtgctattaattggataaaggtcttaactccctcctttcacttgtctttagatgccgcgctacaagcctgagtacctgtttggtgttgagggttttgttcaagagttgcgtacgatgtcctttgtcattggatttgggactgcccctttttatgcccagattcctcatgatcgtcatgaagagaagtgccgagtcaaagtcaccttgaacagcaatagtgaagaggtcccctcagtgatgtttgaagctggaggaagaaactacatccatgcatgtcaggaagtggcaaggatcaccataggagagctccgtgatcgctacagtgatcagttggttgacactgagtatcgctaccatcctcgtcaaccccagggaagtgaccgtggcagctaccttgagactgaaggaattgagaatgatgctaccacaaggcatttggttgagatgctgtgggctatggatgaaagtcgtgcggagactgtgttagcggctcaagatcgtgaagaccggaatcgtggtaagatttgcaagctagaagacaaggtggatcgtttggagaaggaattagccgcattaaagggagaagcaccgccacagaaggccaggattcgtcttaccgcaaggaagagagctttatttgtccctcgctatcaattggcgccaaaggtccgtgtggtggagaaagaagttgccccagcccaagcggatcctccggtcatcatcataagtgatgaagaagaagaatccaagcgcaaccattccaagattgagtgggtagcaacttaagatgatgaagacgagccgaacgagccttcaatcgacctccgatgcttggaagaactagagtgacttgttaagtcgttgtcttagatcgttgtgttagtttgcttgctttaagtttgcttgtgtgtggctcgcatgtgatttacatcagtggtgggatgtaattgcatgtgtttgtttgcttttgagtgttaggaagttggtgagtttagtggtgtgagagtcttcagtttgtaataatgaaactcagttaagatcaataaaagctaaagtaattctctgtcctaagtagtttcccccgttttctcttcttgtgccctgtccatgccagatggtgaacactcgcagcaatgggaatggccctaacaaccccaataacaacaacaatggagagaatcccactcttgctcaagttcttgctcaacagactcagttaatgaacatgatgatgcagcaactccagaaccagcagaaccaaggaaataaccatgcacctcctcagaataagttagcagaatttcttcgtgtgaggccgcctgttttctctagtaccactaatcctgttgaagctggtgattggctgcatgccatagagaagaagttggatttacttcagtgcactgatcaggagaaggtatcatttgcatcacatcaattgcatggccctgcctctgaatggtgggatcacttccgcctgaataggataactgctgaacctatcacttggcttgaattcaccgctgctttccgaaagacgcatataccatcaggagtagtgtctctcaagaagaaggagttcaggtcgcttactcagggatctcgctctgttacggagtatttgcacgagttcaatcgtcttgctcgttatgctccggaagacgtgcgcaatgatgaagatcgccaggagaagttcttggaaggactgaatgatgagctttcttacccactcatgactggagattatcctgatttcctgtcacgaccggaaataacccaacgggcgttccttacgtgcgtgcattaatccttatcccaggaggcaaggtacaccaaaagttgatacaatctagagtttaacaagcggaagcgtaaatagttaacttattacatgggcagcgaaggcccagcacacccacaagtgcagaataaatgcaagggaatacaaaggaattataccataaagggttagggttgcaggaaacagcatttaaagatatttagttgctcagagctattttgtaaacgcgatcctagaactatgcaatattattaatcaaggccgtgaacccacacgaacctgccttaacccaaggcctatgatgattcagaccaaactggcaacccgaccctgggtcccagctcgtcctaagccaacccaggccaaccattccaccttttagttgttaagcaggttttaagaattaaaacactaacttgggtacattgctcggcttgcccataaccgagggcgcggctattcgaatagattatactctgatcagaggtgtacatctttacccacaagacacatcttcctcacgtgcaaccacgtgccacataccaccacggtatacagacggaagacgtgacatagtttccaacccatcctagccatagacaagagtaccgacccaatcccacctacggccggaacccccgggacaggcaggcaggactgagcccctagcagcaggacaccggccctgtgccatgacatctcgactaccgggccgcagctcgtgtagccttcatttgccctagagatgtccatcgacccccgacttcttccatctccatccgtgtacttttgtttataaccaggctgagccacaaactaagccttacccactagacatgtggaagtacggtagtgctttgcaacagaggcccgaagaccggtccttatatggccgaggtgctactatcacaaccatgcaccccgagcccagcctaaaaccattttggggattttgaatagaaggagcggtgtgaagccaattccacaataaccaaaccattccatagtgtccaggtgataagaatattcccaaagtctagagttgtaaaaccacctaatgttacctaaataaatagcgaagcatctacctaaaatcatactagggataccatgagtagagtgtccactagttggggttttgtttattctagggtgaacaaggtaataataacaataacaataataataaggtcataacaaaggtgaataggcatggctaaataaaacagtgatgacgcgggaatttaaataaagcgataatgcaataatttaaatcaacataattttataaactgggattcaatatgctcaaagatgatgtgacttgccttgctcgctttcccaaacgtcggctttaacttccacgaagagcggatcttccgaagctgcagcgtctacacgaccaacggaaaagaaaagccttttactctaataaactccatataacaagcagaaacaaagcataaacatgggttcttgacttcttaaggaaaaattagagacttgaacggtccaattccgagttcaaatggccaagttatggccatttgaagtttatatgctctttaaatggatatttgcgaatttcttcatttaaattttaatttaaaatcggatttattgcgtcagccgaggggaggggcgcgcggaccgggtccacgggagtggggcccacgcggcagcctcacggtcgacggggagaggggagggggaagcgtaaaggcggtccacggctcaccccgggtcgacggcgacgacgggaacggcgaccggagcggaggaaggcggcggcgcggctcgggtagacgaggacggcggcgttccggcggtcggcaggcgaaacgaaggagtggacaaggtcggcgagaacgcggcgaatccgaaggaggcgatgccgaagcgggaggaggtccggggcgacgacggcggcgaaccggagatcggcggcgacggcggagagagaggacgacggcgcgagctcgaatccgacggggagagagagcggcgagtggcggaaacggaggagggaggcacgaggagcgcttaaatagggttgggagggggagagagcggccggatgagggggaatcggccgcggaagatccggccgccattgatgcgccggcgatgtttgcgggagtgattccaaacgaatccgagggagagagagagggaaaagtggggggaaagagagagggaatcacggggagtgatttccccatctttattgcacgcgggggcggcgggatgcggcggaatccgcggcggcggcggcgctagggcacgggcgaggcggcggggccggcgcgaggtaggggatgacgggtgggccccacccgtcagcgagggtggcgggcgggcccgcccgtcagcggcgcgcgcgcgggggaaggccgattgggccgcgggggagaggagagagagggagagagctgggccgagccggcccaagagggggaaggggggaaaaggactttttagggtttttctttttataaaaccattttaactttgtttatttcttctcaattattatttgtgccctgaaaattccactaaaatttatttatgcattttaggcttttaggaaatatacaaaaatcctccaagccttattcgacttttaactttgcacattttaattgttggaggctttcacatgaattttaattattctatgcacaatttcgaggatgtattttagagtcgttttgggacgcgacatttccagaagttagtggataaggctattcgttaggaggacaagtataatcgcatggagcagaagaaacgccggattgctcacttcaaggcacaacaggggagtaatcagaagccgcgtcttactttaggaccccagcctatgccacatggaggttcttcatctgttgttcgtccgcagcgccagttcttcaacaacaatgctggcaataacatccgcaatcaagctccacgtcctgttgcagctccaacacagcaacaacctgccaagagagagcaaggcagcaagcccgtggtgtgtttcaactgtggagacccaggacattatgctgacaagtgtccgaagccccgtcgcgtgaaggttgtccctgcccagagcaattctaccgtaccagcatcaaaggcccgtgtcaatcatgtcgctgctgcagaagctcaagatgctcccgatgtgattttgggtacgttccctgttaactcagttcctgcaacagtacttttcgattctggtgctacacattcattcttatctatgagttttgcgggaaatcatgggatggaagtagaagatcttagacgtcctttgatggttagtaccccaagtgatcaagcactttctttgcaacgtagcccctcggtcagaatagaaattaagggagtaccatttctggccaatcttatcttgttagaatccaaagaccttgatgtcatcctagggatggactggttagccagacataaaggtgtgatagactgtgctaacagaaaagtaactctcaccagcaatgatggtcgagttgtaactgttcatgcattgtcttctgagtctttaaggtcaagactgaaccagataactttggaagagattcctatagtccgggagtatcctgatgtgttcccagatgatttacctggtatgccacctaaaagggatatagagttcagaatagatttggtacctggaatgactccgatccataagagaccttatcgaatggcagccaatgagttggcagaagttaagaggcaagtagatgatttgcttcagaagggatacatcagaccgagttcatctccatggggagctccggttatttttgtggaaaagaaagatcatacccagagaatgtgtgtggactatcgtgctttaaatgatgtgactatcaagaataagtatccgctacccagaattgatgatttgtttgatcagcttaaaggtgccactgttttctccaagatagatcttcgatcagggtatcatcagttgagaatcaaagaggaagatatacctaagacagcttttaccaccaggtatgggttgttcgaatgtactgttatgtcttttggacttaccaatgcccctgctgtcacgtcccaaatcgactctaaaatacattctcaaaattatgcatagaataagtaaaattcatgtgaaagcctccaacaattaaaatgtgcaaagataaaagtcaaataaggcttggaggatttttgtatatttcctaaaagcctaaaatgcgtaagtaaattttactggaattttcagagcacaaataataattgagaagaaataaacaaagttaaaaaggtttataaaaagaaaaaccctaaaagaagtcttctttcccccccccttcccttcttgggccggctcggcccaattctctccctccctctctctcctctcccccgcggcccatcggcctcctcccccgcgcgcgcgccgcttacaggcgggcccgcccgccaccctcgctgacgggtggggcccacctatcatcgccttcctcgcgccgcgcccgccgcccgcccgtgccctagcgccgccgccgccgccgaatccgccgcatcccgccgtccccgcgcgcattaaagtggggggaattactccccgcgattccctctcccgattcccccactttcccctctctctctccctcggattcgtccgattttgtgcccgcaaagttcgccggcgcaatcaatggcggccgagatctccgcgccggtttccatctcctccggccgctttccctctctcccgacgctatttaattgttccccgtgcctctctcctccgtttccgccgttcgccgctcgctctcaccgtcggaatcgcgctcgcgccgctttcctctctctccgccgtcgccgacgagctccggttcgccgccgccgtcgctccggacttcctcccgtctcggcgtcacctccttcggcttcgccgcgtcgtcgtcgacctcgtccgcgcctccgtttcgcccgccgaccgtcggagcgccgtcgtcctcgtcgtcccgaaccgcgccgccgccttcccccgcttcggccgccgttcccgtcgtcgccgtcgacccggggtgagccgaagaccgccctttcgcttccctctcctctccgctctctcgggcgccgctacgccgcgccggtggtcgccggcggtgaccatcggggcgcgggtgcgccgcctcccttcggccgtgccggcgaggccgccttcgggcgcgccctcgcggctgccaagtgggcccggccgtcagccgcccgcgcccgcgggtgcggctgacgcgtgggacccacggcgccggccgccgtcagccgcgtgcgcccggtccaccatggaccgagaggctgacgcgtgggccccactcccgtggacccggtccgcgcgccctctccctcggctgacgcaataaacccggtttttaattaaaatttaaatgaagaaattcgtaaatatccatttaaagagcatataaacttcaaatggccatatcttggccatttgaactcggaattggaccgttcaagtctctaatttttccttaagatgtcaagaacccatttttgtgctttgtttctgctgttatgtggagtttattagagtaaaagcctttttcttttccgttggtcgtgtagacgctgcagcttcggaagatccgctcttcgtggaagtcgaagccgtcggttgggaaagcgagcaaggcaagtcacatcatctttgaacatattgaatcccagtttgtaaaattatgttgatttaaattattgcattatcgctttatttaaattcccgcgttatcactgttttatttagccatgcctatttacctttgttatgaccatattattattgttattgttattattattaccttgttcaccctagattaaacaaaacctcaactagtggacactctactcgtggtatccctagtttaaatttaggtagatgcttcgcaatttaattaggtaacattaggtggttttacaactttagacttgggaaatattcatatcacctggacactatggaattgttggattattgtggaattggcttcacaccgccccctctattcaaaatcccctaaaatggttttaggctgggctcggggtgcatggttttgatagtagcacctcggccatataaggaccggtcttcgggcctctgttgcaaagcactaccgtacttccacatgtctagtgggtaaggcttagtttgtggctcagtctagtcataaacaaaagtacacggattggagatggatgaagtcgggggtcgatggacattctccagggcaaatgaaggctacacgagctgcggcccggtagtcgagatgtcatggcagagggttggtgccctgctgctaggggctcagtcttgcctgcctgtcccgggggttccggccgtaggcgggattgggtcggtactcttgtctatggctaggatgggttggaaactatgtcacgtcttccgtctgtataccgtggtggtatgtggcacgtggttacacgtgaggaagatgtgtcttgtgggtaaagatgtacacctctgatcagagtataatctattcgaatagccgagccctcggttatgggcaatccgagcaatgtacccaagttagtgttttaattcttaaaacttgcttaacgactaaaatatggaatggttggcctgggttggcttgggacgagctgggacccagggtcgggttgccagttcggtctgaatcatcataggccttgggttaaggcaggttcgtgtgggttcacggccttgattaataacattgtatagttctaagatcgtgtgtacaaaatagccctgagcaactaaatgtctttaaatgctgtttactgcaacccgaaccctttatgttataatccccttgtactcccttgcatttattctgcatttgtgggtgtgtcttgttgagtacggtggttgtactcagtcttgctcaatttttttcccaagcccagaagaggagctccttgaagatgaaggctttggtgtctagctcgtgcctgccgtctagtgcctgtggtcgtcgccctagtcttccgctgttcttcgtttgtctctgtgtgtgctgggccttcgctgcccatgtaataagttaactatttacgcttccgcttgttaaactctgaattgtatcaacttttggtgtaccttgcctcctgggacaaggattaatgcacgcacgtcaggaacgcccgttgggttatttccggtcgtgacaagttggtatcagagcctcccttgaccctacgacgagccgtagatcccaagccttagcagtattttcaaaaataaaaatcttttgttatttgtgaaaactgtctagtctctctctgtcttgctgcttcacttatcatcaaaatctgacctttgaaatcttgcttttctttttgtttttgtttgtagatggccggcagcgtcacccgtcgtggtttggacatgactggcttcgtcttggagctgcggggcatgtgcgtggtcttagggtatccacacggagtggactaccaggccaggccgcttccggatcaggagggagacgacgcggagccccacgctgggtgggaggtcactgcagtgatcctctctggctctcccgagcggacttcgctggcagtcaccgcgggcggagattccttccccgccgcttgccagaacgccgctctcctcgccatcggcactcttcaccagcgctacccggacgagttgcagcactcgccctaccgctaccaccctcgtcgcggaggagcccgcgactacgccaccttccgggatgctagctcggaggatgacgctaccatcgtgcacctggcacgcatggtggaggcgtacgacgcggctcgtatcgacttccatcagatggtgcgccgcgggatggtcgagaacaacatgaagatcctagagctgcgtcaggagaacctgcagctcaagaaggacctcgacgcggtggaggcgcagctgcaccagctcaagatcgcccagggagagatctgccaccccaagcgtcgccgcgtctgccgcagccagaagatcaccgcccgcaagagcacctccctggcgtggacttgcttcgtcgagacccctcgtgccgagcctgcgcccgtggttccccaggagggggaagcctccggcgttggtagctcggagggtgcgctgttgctcaccttccgtcctggcccgtcgcagcggtagacgagcagttagtaggcttgcgcgtgtgttctttctcgtttgtcttcttggttgggttgtgtggggcatggttatgccggtgtgtggcataactgtgtcggagcctgtctttattttatttgcttaagcaacttgaactttaatgaaccaatttaatagcagtaataaattcaagaataatggtagtcgtgggtggttagctttaattgttagctctttctctgtttgctggttctgtgtggggttttcagatggtgacgaccaggagaaacgctgttaccggtgagggcaatcaacctgaaggcagcaaccacaaccaccaaggcaatccacctccacctcctcctccgcctccaccaccaccaccagacaccaacgccattctcacccaaatcctcgcccagcaagccaacatgatgaccgctttcctccaccacctccaaaacccgccacaacagaatgctccaccaccacccccacaacactctaaactcgccgagttcctccgcatccgcccacctaccttctccagctccaacaaccccgtggatgctttggattggttgcatgccgtggggaagaagttagacacggtgcagtgcagcgatgaggagaaagtcgtcttcgccgcccaccagctgcagggacccgcatctctatggtgggaccatttccaggctacgcagccagaggggcaacctattacttgggctcgcttcaccgccgctttccggagaacccatgtgcccgctggagtcgtggctcttaagaaaagggaattccgagagttgaagcaaggcaaccgctccgtgatggagtatttgcacgagttcaacaacttggcccgttacgctccggaggacgtgcgggaagatgaggagaagcaagagaagttcctggcaggaatggacccctagctgtccgtccgcctagtctctggggactatccggattttcaacgattggtggacaagagcatccgcttggaagccaagcacaaggagctggaatcgcacaagcgccgcttggcgaatttccgcaatcagcagggtgctaaccaaagggtccgctacaccaatccctatccagggggatcctcctcgcagcagcaacaacagcagcagcaacctcgctccgcgccccgacctcaattcgtggtgcgtgtcccacagccgcagcagcagcagaatcaacaagggactcgtgcgccccgtcctcccacgtcagctgtgcagcccgttcaaggccgcagggacgctcaaggtcagcagcgtctgtgcttcaactgcttcgagcccgggcactttgcggataaatgcccgaagccaaggcgtcagcaaggccaagcgcctccccaccccaacaacggcgggaaggatgtcattcggggtcgtgtgaatcacgtgacggccgaggacgtgctgacaactccagacgtcattgttggtacgttcctcgttcattccatccctgctacaattttgttcgactctggagcttcccactcgtttatatctgtgccattcgtggggagaaatcagttgggggtagaaaggcttaggaaccctctgctcatcaccacccctggaggggttatgacagcaaagtattatagtcctgccgtccctatagaaattcaggggattccttttccctcggatctgattctgctagacaccaagaacttggatgtgattcttgggatgaattggttggctcaattccaaggagtagtggattgcgcaagacgcactgtcactctgtaccgagggccggaacagccggttgttttctttgcacccccaacctctgtcagaagttcagaacttcatcagataggactgtcagaaatccccatcgtcagggagttcggagatgtgtttccggaagaactacccggtatgccgcccaagcgtgagattgagttccggatagatcttgctccaggaaccactcctctgcacaagcgaccctaccgtatggcagcaaatgaactagccgaagtaaagaaacagttggaagagttgaaagaaaaggggtacatacgtccgagtacttccccatggggtgctcctgtgatttttgtagagaagaaagacaagacgaagaggatgtgcgtcgactacagagctctcaatgaagtcaccatcaaaaacaagtaccctcttccccggatcgatgatctgttcgatcaactcaaaggtgccactgtattctccaagattgatctccgttccggatatcaccaattacgtattcgtgaagaagatattccgaagaccgcattcaccacgcgatatggactgtatgaattcacggtgatgtcgttcggtttgaccaatgcacctgccttcttcatgaacttgatgaacaaagtgttcatggaatacttggataagtttgttgtggttttcattgatgacattctgatatactcacaatcagaggaagaccatcaacaccatctccgtctggtgttgggaaagttgcgggaacatcaattgtatgccaagcttagcaagtgtgagttctggttgtccgaagtcacattcttagggcacgtgatatctgctaaaggagttgctgtggatcccgaaacagtgaccgccgtcaccgattggaagcaacccaagacagttactcaagtccgcagtttcttaggtttggcaggatactatcggagattcatcgagaacttctccaaaatcgctcgacccatgacacagttgttgaagaaagaagagaaatttgtgtggagcccgcaatgcgagaaggcgtttcaaactctcaaggaaaagctggtttcctcgccggtgttaatcttgccggatactcgcaaggacttcatagtgtattgtgatgcttcgcgccaaggattggggtgcgtgctcatgcaggacggtcatgtggtagcctatgcctcacgccagctacgtcctcatgaaggcaactaccctacacatgatttggagttagccgcagtagttcatgctctaaaaatctggcggcactatctcattgggaatcgctgtgaaatctataccgaccataagagtctgaaatacatcttcactcagtcggacctgaatcttcggcaaaggagatggttagaactcatcaaggattatgatgtgggaattcactatcatcctggtaaggccaacgtggttgccgacgctctaagtcgaaagggccattgcaacactcttaacgtccgaggctttccacccgaacttaaccaacggatggaagccctgaatctaagcatagtgggtcgtggattcttagctgcattggaagccaagtccaccttgctcgatcaaatccgcgaggctcagaagaatgatccggacatgcatggactcctcaagaatatgaaacagggtaaagccgctggtttcacagaggatgaacacggaaccctatggaacggaaatcgggtatgcgtcccagataacagagaacttaaacagctgatacttcaggaagctcacgaaagtccttattccatccaccctggcagtacaaaaatgtacttagacttgaaagagaaatactggtgggttagcatgaagcgggagattgcagagttcgtggccctgtgtgatgtgtgccagcgtgtcaaggcagagcaccagcgaccggccggacttctccaacctctccaagtaccagaatggaaatgggatgaaattgggatggatttcatcaccggacttccgaagacccaaggtggatatgattctatatgggtagttgtggatcgattaaccaaggtagctcgatttattcctgtgaagaccacctatggagggaacaagctagccgagctctacttcgctaggatcgtgagtctccatggcgttcccaagaaaatcgtatctgataggggaagtcaattcacctctcacttttggaagaagctccaagaagagctgggtactcgattgaatttcagcaccgcctatcacccgcagacagatgggcagaccgagcgtctaaatcagatcctagaagacatgcttcgtgcatgtgtactagatttcgggaagacctgggataagagtctcccctatgccgagttctcctacaataacagctatcaatccagcatacaaatggcaccatatgaagcattgtacgggcgcaaatgccggacaccgctcttgtgggaccaggttggggaaagtcaagtgttcgggactgatatcctgagagaagctgaagctaaagtcagaatcattcgggataatctaaaggtggcacagtcccggcagaaaagttatgcagataaccgtcgccgtgacttggaattcgcagtggatgactttgtgtatcttcgggtcacgccattgcgaggtgtacacaggtttcagacgaaagggaagcttgcacctcggtatgtgggtcctttccgtatcgttgctcgacgcggagaagtcgcttaccagttggagctgcccgcctccttgggcaacgtgcatgatgtgttccatgtgtcgcaactcaagaaatgccttcgagtgccatccgagcaggccgactcagagcaaattaaagttcgtgaagatttgacctacgtggagaggccagtgaaaatcctggacaccatggagcgcaggaccaggaactgggtaatccgtttttgcaaggtccagtggagcaatcacgccgaagaagaagctacttgggagcgtgaagacgagctgaaggcagcccatcccgatctcttcgtcagttcttccgaatctcggggtcgagattccgtttaaggggggtaggtttgtcacgtcccaaatcgactctaaaatacattctcaaaattatgcatagaataagtaaaatccatgtgaaagcctccaacaattaaaatgtgcaaagataaaagtcaaataaggcttggaggatttttgtatatttcctaaaagcctaaaatgcgtaagtaaattttagtggaattttcagagcacaaataataattgagaagaaataaacaaagttaaaaaggtttataaaaagaaaaaccctaaaagaagtcttcttttcccccccttcccttcttgggccggctcggcccaattctctccctccctctctctcctctcccccgcggcccatcggcctcctcccccgcgcgcgcgccgctgacaggcgggcccgcccgccaccctcgctgacgggtggggcccacctgtcatcgccttcctcgcgccgcgcccgccgcccgcccgtgccctagcgccgccgccgccgccgaatccgccgcatcccgccgtccccgcgcgcattaaagtggggggaattactccccgcgattccctctcccgattcccccactttcccctctctctctccctcggattcgtccgattttgtgcccgcaaagttcgccggcgcaatcaatggcggccgagatctccgcgccggtttccatctcctccggccgctttccctctctcccgacgctatttaattgttccccgtgcctctctcctccgtttccgccgttcgccgctcgctctcaccgtcggaatcgcgctcgcgccgctttcctctctctccgccgtcgccgacgagctccggttcgccgccgccgtcgctccggacttcctcccgtctcggcgtcacctccttcggcttcgccgcgtcgtcgtcgacctcgtccgcgcctccgtttcgcccgccgaccgtcggagcgccgtcgtcctcgtcgtcccgaaccgcgccgccgccttcccccgcttcggccgccgttcccgtcgtcgccgtcgacccggggtgagccgaagaccgccctttcgcttccctctcctctccgctctctcgggcgccgctacgccgcgccggtggtcgccggcggtgaccatcggggcgcgggtgcgccgcctcccttcggccgtgccggcgaggccgccttcgggcgcgccctcgcggctgccaagtgggcccggccgtcagccgcccgcgcccgcgggtgcggctgacgcgtgggacccacggcgccggccgccgtcagccgcgtgcgcccggtccaccatggaccgagaggctgacgcgtgggccccactcccgtggacccggtccgcgcgccctctccctcggctgacgcaataaacccggtttttaattaaaatttaaatgaagaaattcgtaaatatccatttaaagagcatataaacttcaaatggccatatcttggccatttgaactcggaattggaccgttcaagtctctaatttttccttaagaagtcaagaacccatttttgtgctttgtttctgctgttatgtggagtttattagagtaaaagcctttttcttttccgttggtcgtgtagacgctgcagcttcggaagatccgctcttcgtggaagtcgaagccgtcggttgggaaagcgagcaaggcaagacacatcatctttgaacatattgaatcccagtttgtaaaattatgttgatttaaattattgcattatcgctttatttaaattcccgcgttatcactgttttatttagccatgcctatttacctttgttatgaccatattattattgttattgttattattattaccttgttcaccctagattaaacaaaacctcaactagtggacactctactcgtggtatccctagtttaaatttaggtagatgcttcgcaatttaattaggtaacattaggtggttttacaactttagacttgggaaatattcatatcacctggacactatggaattgttggattattgtggaattggcttcacaccgccccctctattcaaaatcccctaaaatggttttaggctgggctcggggtgcatggttttgatagtagcacctcggccatataaggaccggtcttcgggcctctgttgcaaagcactaccgtacttccacatgtctagtgggtaaggcttagtttgtggctcagtctagtcataaacaaaagtacacggattggagatggatgaagtcgggggtcgatggacattctccagggcaaagaaggctacacgagctgcggcccggtagtcgagatgtcatggcagagggttggtgccctgctgctaggggctcagtcttgcctgcctgtcccgggggttccggccgtaggcgggattgggtcggtactcttgtctatggctaggatgggttggaaactatgtcacgtcttccgtctgtataccgtggtggtatatggcacgtggttacacgtgaggaagatgtgtcttgtgggtaaagatgtacacctctgatcagagtataatctattcgaatagccgagccctcggttatgggcaagccgagcaatgtacccaagttagtgttttaattcttaaaacttgcttaacgactaaaatatggaatggttggcctgggttggcttgggacgagctgggacccggggtcgggttgccagttcggtctgaatcatcataggccttgggttaaggcaggttcgtgtgggttcacggccttgattaataacattgtatagttctaagatcgtgtgtacaaaatagccctgagcaactaaatgtctttaaatgctgtttactgcaacccgaaccctttatgttataatccccttgtactcccttgcatttattctgcatttgtgggtgtgtcttgttgactacggtggttgtactcagtcttgctcaatttttttcccaagcccagaagaggagctccttgaagatgaaggctttggtgtctagctcgtgcctgccgtctagtgcctgtggtcgtcgccctagtcttccgctgttcttcgtttgtctctgtgtgtgctgggccttcgctgcgcatgtaataagttaactatttacgcttccgcttgttaaactctgaattgtatcaacttttggtgtaccttgcctcctgggacaaggattaatgcacgcacgtcaggaacgcccgttgggttatttccggtcgtgacacctgctttcttcatgaacttgatgaataaggtgtttatggaatacctagacaagttcgtagtggtctttattgatgatattcttatctactctcgaaccaaagaagagcatgaagaacatcttcgccttgcattggagaagctacgagaacatcaactatatgctaagtttagcaagtgtgaattttggttgtctgaagtgaaattccttggtcacgtcatctcagccggaggagttgccgttgatcctagtaatgtggaatctgtaaccaactggaaacaaccaaagacagtttcagagattcgcagtttcctaggcctcgcaggatattatcggaggtttatagagaatttttctaagattgctaagcccatgacacgactgcttcagaaagatgtgaagtacaagtggtcggaagaatgtgagcagagttttcaagagttgaaaagtcgcctaatctcagctcctattttgattttgcctgatccaaagaagggtttccaagtgtattgcgatacatccaaacttgggttaggttgtgttctaatgcaagatgggaaggtggttgcctatgcatctcgtcagttacgtccgcatgagaagaactaccctactcatgatcttgaattagctgcagtagttcatgcgttgaagatttggcgtcattatcttttcggtactcgtacagaggtatacaccgatcacaagagtttaaagtatatctttactcagccagatctgaacatgagacaacggagatggttggaattaattaaggattattacatgggaattcattatcacccgggaaaggctaatgttgtagcagacgctcttagcaggaaaggttattgcaatgctacagaaggacgacagttgccattggaattatgcaaggaatttgaaagattaaatttgggaattgtcagtagaggtttcgttgcagctttagaagcgaagtccactctaattgatcaagttagagaaacccaaattaatgatccagatattcaagaaatcaagaagaatatgagaagaggaaaagctattggtttcttggaggatgagcaaggaactgtatggttgggtgaaagaatctgtgtccccgacaacaaagatttaaaggatgcaattctgaaagaagctcatgatactttatactccatccaccctggtagtactaagatgtaccaggatctcaaggaaagattttggtgggcaagtatgaagcgtgaaatcgcagaatacgtagcagtatgtgatgtttgtcagcgagtcaaggcggaacatcagaaaccgccggtttgttgcagcctttgaagattcctgaatggaaatgggaagaaattggtatggattttattactggtttacccagaacgtcatcaggccatgactctatttgggtgatagtcgacagacttaccaaagtggctcatttcattccagtaaagacaacctattctggaagtcgattggcggaattgtatatggcaaggattgtgtgtttgcatggtgtcgcgtcccaaaacgactctaaaatacatcctcgaaattgtgccgagaataattaaaattcatgtgaacgcctccaacaattaaaatgtgcaaatttaaaagtcaaataaggcttggaggatttttgtatatttcctaaaagcctaaaatgcgtaaataaattttagtggaattttcagagcacaaataataattgagaagaaataaacaaagttaaaaaggttttataaaaagaaaaaccctaaaagaagtccttttcccccctcccttcttgggccggctcggcccaactccctccctctctctcctctcccccgcggcccatcggccttcccccgcgcgcgcaccgctgacgggcgggccctcccgccaccccgctgacgggtggggcccacccgtcatcccctacctcgcgccgcacccgccgcccgcccgtgccctagcgccgccgccgccgccgaatccgccgcatcccgctgtccccgcgcgccataaagagggggaaatcactccccgtgattccctccctcttttcccccgctttttcctctctctctctccctcggattcgttcggatttgctcccgcaaacctcgccggcgccattgatggagcccgagatttccgcggccgattccttcccctccggccgccctctctcactcccgacgctatttaaacgttccccgtgcatctctcctccgtttctgccacacgccgcactctctccccgtcggattcgagctcgcgccgtcgtcctctctctccaccgtcgccgccgagctccggttcgccgccgtcgtcgccccggacctcctcccgcttcggcgtcgcctccttcggcttcgccgcgttctcgtcaacctcgtccgctcctccgtttcgcccgccgaccgccggagcaccgccgtcctcgtcgacccgagccgcgccgccgcctctctccgcttcggtcgccgttcccgtcgtcgccgtcgacccggggtgagccgaggaccgccatctcgtttcccccttccctcccctctctcggccgccgctccgccgtgcctatggccgccaccggcgaccataggggcgcgggcgcgccgcctcccgtcggccgtgccggcgaggccgccttcgggcgcgccccgcggctgccaggtggggcccggccgtcagccgcccgcgcccgcgggtacggcggacgcgtgggacccacggcgccggccggcgtcagccgcgtgcgcccagtccaccgtggaccgtgaggctgacgcgtgggccccactcccgtggacccggtccgcgcgccctctccctcggctgacgcaataaatccgatttttaattaaaatttaaatgaagaaattcgcaaatatccatttaaagagcatataaacttcaaatggccataacttggccatttgaactcggaattggaccgttcaagtctctaatttttccttaagaagtcaagaacccatttttgtgctttgtttctgcttgttacatggagtttattagagtaaaagccttttcttttccgttggtcgtgtagacgctgcagcttcggaagatccgctcttcgtggaagttgaagccgacgtttgggaaagcgagcaaggcaagtcacatcatctttgagcatattgaatcccagtttataaaattatgttgatttaaattattgcattatcgctttatttaaattcccgcgttatcactgttttatttagccatgcctatttacctttgttatgaccatattattattgttattgttattattattaccttgttcaccctagattaaacaaaacctcaactagtggacactctactcatggcaccactagtttaattttaggtagatgcttcgcaatttaattaggaaacattaggtggtttttcaactatagactttgggaaatattcatatcacctggatactttggaatggtttggttattgtggaattggcttcacaccgctctttctattcaaaatccccaaaatagttttaggctgggctcgaggtgcatggttttgatagtagcacctcggccatgtaaggaccggtcttcgggcctctgttgcaaagcactaccgtacttccacatgtctagtgggtaaggcttagtttgtggctcagtctggttataaacaaaagtacacggatggagatggatgaagtcgggggtcgatggacattctccagggcaaatgaaggctacacgagctgcggcccggtagtcgagatgtcatggcacagggccggtgtcctgctgctaggggctcagtcctgcctgcctgtcccgggggttccggccgtaggcgggattgggtcggtactcttgtctatggctaggatgggttggaaactatgtcacgtcttccgtctgtataccgtggtggtatgtggcacgtggttgcacgtgaggaagatgtgtcttgtgggtaaagatgtacacctctgatcagagtataatctattcgaatagccgcgccctcggttatgggcaagccgagcaatgtacccaagttagtgttttaattcttaaaacctgcttaacaactaaaatgtggaatggttggcctgggttggcttgggacgagctgggacccagggtcgggttgccagttcggtctgaatcatcataggccttgggttaaggcaggttcgtgtgggttcacggccttgattaataatattgtatagttctaggatcgcgtttacaaaatagctttgagcaactaaatgtctttaaatgctgtttactgcaaccctaaccctttatggtataacccccttgtactcccttgcatttattctgcatttgtgggtgtgtcttgttgagtacggtggttgtactcagtcttgctcaattttttcccaagcccagaagaggagctccttgaagatgaaggctttggtgtcttgctcgtgcctgccgtcaagcgcctgtggtcgtcgccctagtcttccgctgtttcccgtttgtctttgtgtgtgctgggccttcgctgcccatgtaataagttaactatttacgcttccgcttgttaaactctgaattgtatcaacttttggtgtaccttgcctcctgggacaaggattaatgcacgcacgtaaggaacgcccgttgggttaattccggtcgtgacacatggcatccctaagaagatagtgtctgatcgaggcagtcagtttacttgaaatttttggaagaaacttcaggaagagatgggttctaagctgaactttagcactgcttatcatccgcagacagacggacaaaccgaaagggtgaatcagattttggaagacatgttgagagcttgtgctttagacttcggtggaagttgggataagaatctaccctatgcagaattttcgtacaacaacagttatcaagctagtctacagatggctccgtacgaagcactgtatggtcggaagtgccgcactccgcttttgtgggatcaaacgggagaacgtcaggttttcgggacggatatcctaagggaagcagaagaaaaggtaaagatcattcaagaaagattgcgtgtggctcagtctcgtcataagagttatgccgacaatcgccgtagggatttgagttttgaagaaggagattatgtgtatcttcgtgtcacgccttttcgaggagttcatcgttttcacaccaaaggaaaattggcaccgcgttttgtgggaccttataagattgtcagtagaagaggagaggtcgcttatcagttggagttacctcaatctttggcaggagtccataatgtgttccatgtgtcgcaattgaaaaagtgtttaagggtacctatcgaagaagctaatcttgaccagatagaagtccaagaggatctgacctatgttgagaaaccaatccgtatcttggaaacaagtgagagaagaaccaggaatcgagttatccgtttttgcaaagtccagtggagtaatcactcggaagaagagtcaacttgggaacgagaagatgaattgaagtcagctcatccgcatctgttcgccagttcttccgaatctcgaggacgagattttgtttaaggggggtaggtttgtcacaccctgaaaatcataaatatataaattgttgtttaaatggaatttttagaaataattttaaaagtcttgaaaagaaaatctaattttaattaataaattccaatataaaatgggcccagataaaatttcattaaatactttgcttaattctataattcctagatttttctgggatttatttgagctaagaaagtatttttaataaatggaattgcatttaagaaataattttaattgaaaaaggttttaaaaagtcttcttttggctttgggccgaaagtcggcccaaaacctctcttctctctcctcggcccagccggcccagtcagccgccgcgcgcgcgcgccctcgctcgctgacaggtggggtccacctgtcggacccttcgtcttccttcggccgccgccgccgaaaccctagtttcgcgccgccgccgtctccttccaaatccggccgctcctttccttctccggccgaattgatagaggagaaatgatcctcgggatctcctctaccttttctcctttggaaacatcggctaaatcgttttggaagttcgtggaatcgagttcgattcggatcggcctctttccttcaagccgcgggctttcctttcgtcgccggtcgccgtgggccttcgccgccgcctccgagcccctttaaaaggacccccggtgtctcctctacccgtcgccaccctcgccttcgcctctcgtcgccggaatcgctctagcgccgtgtgccctagcttcgccgtcgccgccgccgctccagccgtgcgccgccgtcgtttcagccgtcgccgttgctcgggaaggacgtcatcgtggtcgccaagtcgtcgccgtcctcgtccgccccttcgccgtcgctggagatcgccggagcctcgtcgccgtcgtcaacccgaagatttccgccgtttcctcctcgtcgccgtcgtcgtccgttgttcttccgccgccgttttggtcaccggagtgttcgccgcgtcgtcctctacgtgctggtggcctccgtttgcgtcctcgcgccgccgttcaccggcgagcgtgcgccgcccgagctgtccactccgccgagccgccgccgctgccggtgacgtcattgccgacgtcatcggggtcgtccgccgtaagccggtcgtggaccgttcgatctcggccgtccgttttggattggatcgatctcggccgtccgttcgcgtgaaccgccgcccgtgcgcccggtccaccaaaaccctagcccgctgacgcaataaaccttcttttccttttcaaaaataattcattattgcgtcataattcaattttaaccgatttaagtgttttaatccgatttaatcttcaaaaattcataacaaattcatcttagctccgatttagttggttcaagtctctaaatttttctaaaattgagatctacacattaaaaatatccacatgtactgttcatgcttgtttatgtgctgttttggtgattttgctcttttctgcttagattccgtcgtttccggagattccgttttcgccggagaagagtttgaagagttccaaggccagcaaggcaagtcacacagatcccaaacaatcctttgagcatgttgatcctatttaaagctattgtttcttttcaactattgcatttattttcgaatgtcattgggtggaattaacctattgtttgttatagcccttttgttcttgattactttattccttgataccttgggttattataatttgactagttgagctttatttatattggttcaactagatattagatataattgcttagccctgcttagaaacattagcacactattgggataacttatgactcactattatttcatgatggcttaatgatagttcacgatggacaatcgtgattagttaattaattaatgtgccaactaaaacctaataatggtgggttgtgagcacatggttttgatggtcgtgctcatgacaattaaggaccggttcacgagtttcggttgtgaaacattaatcgtgccaaccacaagccagcatgagcaacggctttatcttttgtatagcatggttcattgcggggcaccagactgagaagtggcggagataagcccacgggggtcgctggggagtccatgccttgtttataatggggtgattatgatccaggaaggtgcgctgcagtggattgtgttatgcgaggggtattgtcacaactcctttccgaggtaccgtggtggtattgaggcacatggtgacatgatgtggggttgtgtcttgtgggtacagtggtacacctctgatcagagtaaaactattcgaatagccgtgcccgcggttatgggcgggtctaacaatgtctttcgtgattagtcccacacttctcaccatagtaaatgaagctataattggtaataatttgattagctcctggtttggaatggtacattcctggtttggagatagaactgtgcagccgggatggttgttcagaatggatgggcctatacaacagggtatgttgtatagtgttggattaatattgcttaattaatacttaactgttttattaaattctcaaatgtttgctaaatgctacttttgcaaatgaaaccctattatgccatcctttattatcctgtgcacttgcatatctgctgcgtggcttgctgagtatgtcatatactcaccttgcaatcattcatcagaggaagagttctacaatgaggctgatggtgtggaggattaggtgtagccttggtcaagctgcctgtggagtggagccgtctgcgccgtttatttattttccgctgcttagatctttattgattgagaggaactatctacctctgtaatgacattttattcgcttattaattagagtaataattgtactctattatcaatttgttattgtgtgcctcggctgattcctggacgagggttcacacacatgtaagcgtttggaattttggatagaaattccaggcgtgacaagtgtttgtcacaccctgaaaattcaaaatatataaattgttgtttaaatggaatttttagaatttattttaaaagcctagaagagaagatctaattttaattaataaattccaatataaaatggggccagataaaatttcattaaatactttgcttaattctataattcctagatttttctgggatttatttgagctaaggaagtatttttaataaatggaattgcatttaagaaataatttaaattgaaaaaggttttaaaaagtcttcttttggctttgggccgaaagtcggcccaaaacccttctctctctcctcggcccagttcagcccagtccgccgcccgcgcgcgcgtcctcgctgtcgctgacaggtggggcccacctgtcaggcccgtcgtcttcctccggccgaaaccctagtttcgcgccgccgccgccgctttccaatccggccgttcctttccgtttccggccgaatcaatagaggggaaatgatcttctcgatctcctctaccttttctcctttggaaaaaccggctaaaatcgtttggaaattcgtggattcgagtttgtttcggattcgattttcccgaactttccttctcgtcgccggccgccgtgggccttcgtcgtcgtctcctagcccctttaaaaggctccccggtgtctcctctacccgtcgccaccttcgccttcgcctctcgtcgccggaagagctccagcgccgtgcaacctagcgccgccgtcgccgccgtcgctccagccgtgcgccgccgccgttccagtcatcgtcgtcgctcgggaagaccgccgtcgggatcgccaagtcgtcgccgtcctcgtccgccccttcgccgtcgctgtagaccgctggagcaccctcgccgccgtcgacccgaagtttgccgccgcttcctcctcgtcgccgtcgccgtccgttgatcttccgccgctcttttggtcaccggtgagttcgccgcgtcgcgctctactcgttggtgccttccgttcgcgccgccgtgccatcgttcgccggcgagcatgcaagcccgagccgccgagccgccgccgccggtggtgacgtcatcgccgacgtcatcagggccgttcgctgtgagccggtcgtggaccgttcgatctcggccgtccgttttggatcaagtcgatctcggccgtccgttcgcgtgagccgtcgcccgtgcgcccggtccaccgaaaccctagcccgctgacgcaataatcctccttttccttttcaaaaataattcattattgcgtcataattcaattaaaatcaatttaagtgttttaatccggtttaatcttcaaaaattcataactaattcatcttagctccgatttagttggttcaagtctctaaatttttctaaaattgagatctacatgttaaaaatatccacatgtactgttcatgcttgtttatgtgctgttttggtgattttgctcttttctgcttagattccgtcgtttccggagagtccgttttcgcaggagaagaatttgaagaattccaaggccagcaaggcaagtcacacagatcccaaacaaccctttgagcatgttgatcccgtttaaagctattgtttctattcaactattgcatttattttcgaatgtcattgggtggaattaacctattgtttgttatagcccttttgttcttgattactttattccttgataccttgggttattataacttgactagttgggctatatatattggttcaactagatattagatataattgcttagctctgcttagaaacattagcacactattaggataacttatgaatcactataatttaatgatggcttaatgatagttcacgatggacaatcgtgattagttaattaattaatgtgccaactaaaacctgataatggtgggttgtgagcacatggttttgatggtcgtgctcatgacaattaaggaccggttcacgagtttcggttgtgaaacattaaccgtgccaaccacaacccagcgtgggcaaggtgcgctgcggtggattgtgttatgcaaggggtattgtcacaactcctttccgaggtaccgtggtggtattgaggcacatggtgacatgatgtggggttgtgtcttgtgggtacagtggtacacctctgatcagagtaaaactattcgaatagccgtgcccgcggttatgggcaggtctaacaatgtctttcgtgattagtctcacacttctcatcatagaagatgctataactggtaataatttgattagctcctggtttggaatggtatattcctggttcggagatagaactgtgcagccggggtggttgttcagaatggttgggcctatgcaacagggtatgttgtatagcgttgatttaatattgtttaattattacttaactgttttattaaattctcaaatgttgctaaatactgcttttgcaaatgaaaccctagtatgccatcctttgttatcctgtgcacttgcatatttgctgcgtggcttgctgagtatgtcatatactcaccttgcaatcattcatcagaggaagagttctacaatgatgctgatggtgtggaggattaggtgtagccttggtcaagctgcctgtggagtggagccgtctgcgccgtttattttatttttccgctgcttagatctttattgtttgagaggaactatctacctctgtaatgacattttattcgcttattaattagagtaataattgtactctattatcaatttgttattgtgtgcctcggctgattcctggacgagggttcacacacatgtaagcgtttggaattttggatagaaattccgggcgtgacaggccaccactgacactgccacggactccccgcgtaggctcgccgcttcccggacacgactcctccccctccccctctagcgccgccgcttcctattccccagcagcagcgggaacatgcctctcagcctaggcagccgcttccagaacgtaccaccgagacgcggagggtgtggcgcggggagatgggatgggatgggatgaaggaggaggcaggggtggcgaggtcggccctgtcgacgacgacgccctcgctccccccggagaggaggaatgcattccccacctctcggaatggttccctgtcgtatgtgtggatcgacgcctccaccgccacgccaccgcccaccactaccagcagcagcgcgccgagcggcagtcgcggaggagatccatggcgggggtggagtgatatttcggatgggccgtggaagcgagatgccgccgccgcgggtctgggaaagaaatgagagaggacgagggttagggtttgcaaccctattttatacttccttggagcaaccatagccattcgatcaagaatcaatggccagaaatttatgggccgagtaccataacgggccgatttcaggtttaagcctactaatatatgtggtatttttttattttaatttataagaacattaaatttaattttagtccgatttttgtgtttcaaatgcaaaaatcataaacaacaaagttgtagaactcaacgagatctacaactattgtattggtcctttttacaaataagttcatttgatcaattcaagttttgaattttcaaaatttgacaacttagaacaaaattggggttaataaatgatttcaaatggaaaagtcaccaaaaccaaagttgtagaactcatcgagatgcaaaaaaaaaaaatttggtcatttctccatctgactttatttgaacaaattgaaatttgaaattcaaagtttaagaacttcaaatataattttttattagtgaacgacttcaactgaaaaagtcatcaacaataaagttgtacaatccatctagatctacaatttttattttggtcatttgttcatccgacaaagtgatagtaatattgttcacaaattttacacatctcccatatggtttcataaattataagagagatgtgtaaattttgtgaacaacgttactatcactttatcaaatgaacaaatgaccaaaataaaatttgtatatctcgatcaatgctacaacttttgtgtttatgactttttcagctgaatttatttactgcttcaaattgtcatttgaagttgccactttctgaaatttaaatctccaattgataaaaaaaagttagatgaaagtatgacaaaaataatagttgtaataacacaataaatggatagattatgaatttagaaaattttagaaaaaagaataatcaaatttgaagttagtatgaggaggtaagactacctacaagttttagccagagattaaaaagataaaccacacacttgttctacaattcaaaattttggatttgaatttatgagtcttcactgtttacttgacgacatgctaaacgtgctcgaaatcgtcgacaatatttttatacggatattgaaaaggaaatcgtctaatttcgagttcatatgagtgagataaactactttaaaattgtattcacgcattaaaagtaaaaacctgctgctattcttgtgaattttcttgtggtttggactgacttacccctcgttcatatcggtacaacacacataaaatgagggcacaatcataaatcaactattggaggggattcagatccataccacccggtggggaacagctcaacgtgggagatgatgaaacacgacaccgccgagtgggtgtgtgccacgtggtggcgacacggccgccgcgaggggattcagatccataccacccggtggggaacagctcaacgtgggagatgatgaaacacgacaccgccgagtgggtgtgtgccacgtgatggcgacacggccgccgcctcagctcctgcgccaggctcactgcatcacagataattaataaaaaagatatgcatccacacaaagatcttcgtagcatagtggtaaagcttcttacaaaaatgcttgtggggtgggtttgattcccagttgcagcatgtaattttttgataaaataaaattcacgacaatttggatatccacatataggaccagtgccacatgtaatttgggcgggcggtgggaccagtgccacatatgcacggtgggaccaactggtattaataaatgagtgccacatatgcgcggtgggatcaacaggtattaataaatgaaatttcgatatccacgtatgtgcggtgggaccaataggtattaataaatgaaaggtgtgcattatttgtgacgaaattttctattgtttcttgacgccacttttaatttcgtcacagagttttggtacctatccccagcatgacggatccatgacgaaatatgaaatttcctcataaatatgctgtattcaatgacaaaattatacaacgtcacgagaaaaacatcatagatgggtgatttcctactagtgaaataggctcaagaaaagaaaaggttcaaaaattctcttggttattttgtgctaaagtttatttgagaaagagtgataaatgcaataggtatatgtgtttagtgtttattcttcaacctatgtgcttgttaagatgttgcattataaattgtatgaaatcatgaattttgattgttgattcaagcttaattgtaaaatctttggttcatggttatactttaatgcatgcttgttatattatagacgggttcatcttctttttattgcaacacatgacatgatatgctatatatatgctaagctcttgaacattaatgaacataattccaatgcttaatgaaatcattgtcaaaagggggagaagtaatgtgaaaatttttggatttttggagaagcaaggtgaatttttggagagttatttttggagaagcaaagtgaatttttggagagttgttcagaagagcatgttttttgttcaattggaaatttcgaatttctttcttttaaaaagagggagaagttttcttttggattttcaagcatgatgtgtacgtttgtacgaagtgtgttttttaccacttttgtttttatttttccaaacaccaaaacatttttgtggatttgctaatgtgttcatcaagagggagattgtaaaatcaaaagtgtttttgattattattctgtgatgaacaattgtcatcggagattattggttttgatatttggaatttattcacgaagtgattttggagatgattggattttcaggtgatcgcaggattcgtcattttatgtgaccggtcagaccgggctctgttagccggtcagaccggcgtgtaatgcgcggtcaaaccggcgcagcccgcggtctaaccggccgacactatgtcagtttcggtttcgggttgtttatttatatatctgagtttatttcatgattatggcttctagatggatactatacgtatgtaatactattgtttgctgctaatgagtcaagttgaagatagcttggtctcggaatatggtttctttgtttattccatgtgtaggtgacttgatgtcttgggagagtatttgcggtgatggaccaggagtcgacttggggataagacgatgtccgtggtggtcagagatcatgcgggatacttaggctagagttgatgcacgtgattgatggagattccatatggcatacgatggagttattgtgtgtgtatgggatgcggagtcaaatttggaaggagttcaaatttggtacgattggttatgtaaagtttctttcttgtactagagggtttcctaaggtgtttaggactcctagtatgagtttggttcgtggttttaggctgcctacctcatgtataaatagagggggagcgtgaggcttcccggtatcgctttagagagcaattgagttgagttttgagttagggttttgagtttagtcgaaatttttgtaaggagtgctgttggtgcactttgtaaacacagagagaaataataaagtcatcatccactttaagagttcttcgatttgtatttcaccgggtttcagcggtctaaccggcaactcaccggcggtcagaccggcggcattgcggcggtcagaccggcgagagcacggcggttagaccggcggcggctacaggcgcggcaggcaatctaggcggtcagaccggagattcaacatcggtcagaccggcggcatccactcggtcagaccggcagatcaatctcggtcagaccgcgatccgtcgatttcgagggtaacttttatttccgctaaaagttttcgtttttttgatataccaaccattcaccccccctctggttggcttagttcttgttattcgatcctacaagcgttagcacgggcatattactagtgatgttaatctgcgcctaatcacgtgctaatcatgttaaccgtttctaacgcctgcgcctaatcacgcgctaatcacgttttccgtttctaacgacaccgccgtacgccgttctctcgttcgctccacgagacacgtgtacaactcgcgcgtatgcgctaagtagcaatctcgcgctattgccgttctcagcggaaatggcgacctcagctgtcccagcaacttcccgaggaaagaggcgctgttgcggcacgccttccgggcgaggagatttccagaagcaggagttacggcgacgcgattttggagagcggagcaaggcgcggaggcgtgggagacggcgcaacagttgcgcaggtcacgagcggcggaagcgcgactcctctcggtggctcttgggccagtgggctgatccacaaattacaacacaaggacctttaactatgccttaggtcttgggcagtcagttacggctgttgtgctggtcaggtggaacaaatctgaatgtgccatctgctagctaccttggaaaacagatcagatatgcaatcaagcttgcaacgtgctatggacttatcctttctctcaaatctttcggatggggtccacctgcatgtgttgtcagcgagatagtatatatggtggtgcatcataatctttaatttaattaccctttcaattttaatttgccataaagtaatcatctgagttgtaaaaggcttaagttaccttaggttttctttagggagtcgtttgggtcggctaagttgtgttgcagctcgagggcgagctgcttgaaaggagggatgtagtgtcataggtagtgggctaaggggtcgagaccctaggaataaggatatagccggttggataagattacactgggtcctccctccatctatataaggatggtttgtatcgttattctaattaagcaatgaatcaaaattagtcttccctaacctaagtccccctctcatccctagcagccgtcaccgtccggctattctcgcggtggtgtttacccccatgaaccctaatccataacacaaatcccactgttttcatttagaataatgaagtaggtaagattgtaaaaataaagtccttttaccaagttgaaaggctcgaaatagttttttttttacagtcagtgtcttagttatttcattctctacactgcagataaaacggttgtaagcccgtaatctgttttttctatgtaaattcctctcggaaggaaaggattattgattttctttttgatcaagctttaatcaagatgtgcaatgagcaatatagcatcttgctcagtgtttttacctgttgaaataaggtttctttaactaagagatatgcttgtcgaactaagctttaatgtcaaagctcgccatctctaatatttcagcattgctgctggagcggagaagtgataaaacatcgaagcaacattgcacacggtaacacggtgatttacgtggaaaaaccaccccaaacagaggagtaaaaaccgcgggaccagctcagccccctccaatatttcaattattggtaatgacagttacacatgtgtcagtggaatttacaatagattacactgctgggtacaacaccttgttagtgtatagtggctactgaaaggctgaaaggctggaagtacaggacaactacaagaggcataatttatggaactccacctcacaaaccatggttccagaaatacatacatttcactaattctgtgaattcttttatctgttccatccaagaattctcttcatcactgaaattatcccctgaacaaagaagcaccctcctgaatccgcaaagagaagttttatggtgtttgcattccaaaaaatagtaaagatccaacgctccataattaaaggtatcatataaaaggtatttaagtattgctatagatacttaggtaggaagggtaaaaagataattttcttaagagttgaaaaatgatataattgtcataatattagttaatattagttggaggtacattgataccgcatcggtagttcattaccatcggatgctattattctccattacattatttgcatgttttttttgtgatttacatattgtttctaagaatacggtcgattaaaatatcagcaaattattgtgtggtttcacaaactttgcacttggttaaaatatccaaacggagatattcacgaactaagtaaataaacaatcaaccatgtaaataggcaggtgcgagatcttatccatgcatttgagcctattggcgtcaaatagatcttttgcctccaattcaatcactcgaccatggcgggttttctccctttatctctttctaatgcaatagtttaaaccctagaaaaattgaacgaggagaaaaaagtggatcttgatatttttccatagtgatgatcagcttatcgaatatatgggaaatgtaccgattcaactaagaaaggtattcacataaaacaaaattacctctaatttattagttaattactccaactaggaaggaagcccgcgcagatacgtgagcaatttatttattgtttataaaaagaatgctagaaaaatcctacgttaccctatttgctacgaggaccacgtacaataccttattttcttttaaaagactaaaaaaattataaccgtacattttgatttgctaaattataagaatgtctatagtcaaacaaaaagttatcccggttatatgtgacctcatatatcaccactacatattatcactatctttaaatctggatctctttttaattcatggaattgcttttgtaccaaaagaataacctaataaattattaatacaatgataggtccatctacatttcacaccgaagagcgcccatgtctcacttatatccaaatctatgttagatatttaaaaatattgcttctaccaattaataggataaaaccattaaagttagatataaatactcctctaattgatgaagccggccatagccgccatggctatcttctatgatgtcttgaaatatgggtcctatacctatgtattatgctcctcaagaaaagcgtggagcataatttcaactccaaattcgaaccttccttccatctccgaataactgtaagtcttatattatgcaaaagttggctaagtatgaaagaggaaatatttgtcaccttatagtatgattttgagatccatggttcccatcaactctctgcactgctgcctcaactctttattgccacacccaaagacatacaattcttgcattgaacaggggaggccatccttgggaagccaccggattgctggacattcatagatccgcaatgtgctgagacagggaaatctatgcagatccgggaggcgctgcaacataggacagttgcaagattcgagttcctggagggagatgaggaaccaaagggccttctcttgtttctcggtgaagtttctccagctcatagttatactggaagcttaacattatcagagacatggagagtaagccgcagacaggcgctaaaagttctcctgcgacgtcatcagtgtaaaggctctgcagtgtagatgaatgctgaagaggaagtcgatggtcctgtttatcctgcataccccgaagcacggtatccaagccaataaataatttgggggttcataatacgattaacgtgctaagatgacgtcagctgaggataggaaagataccatctgactgtagttcgatgtcactttgtcgtatgaataattgaaagagagtgactggagatggcaagagtagcattccttctagttcattttcttgtcctactcggaggggacaaaggtcaaaggtacaggttttaagatggaaccggcacatttttctgataggaaagatagaagccagtttcagttataaaccaacacctatctctccaaaaagatgctggttctagctgttggcacccagcgagcgcatgtttgggtgagaaaagaattatatgtgtcggttttagctgttctggcacctatagtgtcattctttttatgtgtttatgcagtagtgcatggcttcacctgatctggtggatatatatttccctcgctttgctccactttctctccactggcgcatgcctagccctgtccagtgacttctccattgttggctaaattaagcaaacataattaacatatatataataaagctcaaagagcaagattagctcatactataaataatgcttacgacccctaatttccatccccaccattgatactatatataggcgaactgtctcctataaaaggcactccatcaattgatccttgacatacaagaaacaaaggaagctatagctgctcatacaatccctggtgacctaatttgtatggagaaggtgagtatgaggctgggattggtggcgctggtgttactaggcatcatgctggcggcgagccagcaagctgtcgacgcatccagccctacatcggcaataagctatgaaggcctttacaggaaacctgaggacaggcccaagaaaggtgatcccgtcatgaaagctcgtggttgcacagaagctatgaagtgcaatggctgaccgacaagtgcacaatttgctccactctctggattttcatttgttggtttcttcctggcaacgaaagcggcattgcattgtgttagctattttcttttgcttcagaaaatttttttacatctttttaaaagtatgaatagaattgccttgctttgtcacagagtacgcgtgaagaaatccattgtatgtactcgatcaattggccacttaagaaaacgtgttagtttgcatggagacatgatctccaaaatgtaattttgtctactactttctgttgccatctttctatacatacatatattaagtgggtactttatagtatcactcatgttaatcagaaaaatctgaccattaattccgtagattgtaatatcatggccatagatcttaattattgttttatcatgggcttcttttttccaaacgatgcatgtcatctaatccaccaatccaatttgtcccatctattacatacagtccgtatcgtatctcatcctctcacaacacacatactgactctatctgtgtgagccgtcgttgtggagaaaattggcattgtgccactttcaagagtgggtttcgctgtaatgccactcctcaaaatgatttcgttaaaatgccatcgccaacatgtgccaacacgctgcttcgctatgtttccattttcaccagattgagccaagaattggcatgtgtacagaccaatgtgcccctgtctcattctttaggtttgtgagcgaaaggggatcgatattatttgctgactgctttgatttgtcggcgcacctgagggggctctccgttggcgccgcgatggcgacactgcacgtctggatcagtgacctgtacgcggcgctgcagggcggggacgagctctcccgccgctgctcgggagtcgcatctcaaggagctcgacgtgccgttccagaggcgcccgataaggccggctggttcttgacgacgagcgtggctgccaggcactggctggagacaaagaaatcggcagagttagggctgtgttcttttggaggggttggcaacccctcccctccgcacgaaaaacgaagcgatagattaacacatggttaattaagtattaactataaaaaacttgaaaattgaagtaatataatttttttaaagtttctatataaacttttcgtaaaatgcgtaccatttagcagtttgaaaaacgtgcacgcagaaaacgagggagatgggttgggatcctatgaaaaagaacaaagccactagtggtgtaaaatgcaacaaataggactatataggatttttcttggttgggctattcgtagtattattgcacttttatgcaggtgttctcagcttttcttcctccacagatttcttctaatggtaaatgctcaattactttgcatatactgttgcctctgcttccattgacagaagaacatcaagtccaattcctcattcaattgaaataaaaattgctgttaacgttaggtttggcatataatcaataacacaatctacaatgcttccaattcagatatacctgcaaagagagtgagcactgatgaagaggggataactgaataagctggggcaagaccaatgaccaaatagatctgatgtcagctgaataaaagcaaagctagtacttgtacaaaatgaaacaatataaaaaaagacaaatcaaagcagtcggcaaataatctcgatcccctgtcgctcaatgacctaaagaatgagacaagggcacattggtcagtacacatgccaattcttggcttaatctagtgaaaatggaaaaagagcgaagcagcgtgttggcaatcgttgatagcattttaatgaagccattttacggggtggcattacagcgaaacctacttttgaaagtggcacaatgccaatttatttctcgttgttatgttctcgatcggtgacaatcgccgcgtgttcatgatgatctacaaatcgatactaccgtgaacacggcgtggccgtgcagatggttgagagctactacgtgaaagagcatataactttcgattttctattctaacgacagtatcaggctggtaacatttatcgttgaattcaacttcaggtaaacaattatatgctactaaccgtcaacccgtgcgttgcacggggtaactttattgttttgaaaaaagtcatttggaataatcgcacaaacacaatatattcttttgtccaaactattatatattttcttttatttttaaaattatttttccagatatcttatattgctaataacctcagtatttaattttgtaaactggaattgtggtcctattcagactcaatgctatcgttatattgtggaagtgagacatcttttaacatcgttatataattcatcctctttagcagctcataaagtatagaattttatctatttggtatttctaatgttttagcaatatccaaatgaaaataaaattactatgttcttctttgtggatagtgaatattctatagatagataatgttataagcattttaagttattataaatataataagatattggaactgtataatttaaaaatataaattttgacgacaaaatcaaactaccttgaccaaaacatatgacatgaatttggtagatataaagagaaatattgatgtgaaagtgtttgaaacacatgtgtatgaatacaatatttatacataattgtgatgagtattctgaggagatcttgcctagcgttgtgtgtatgcgccacgtcgcttcctcctgcaggcagtcctgatctatatgagatattctcaataactaacatgtgtagattacatatgtaagctactaaatatttgaagaatacctgcggctgccgatgtggtacgtgtgcttcgattggtctgcagactgcaattaatcgatctgccgcttgctacaccttgttgtatgtgcctcgatgcacgccggcgctagagaaatttatcttgtgatgttgtgatctccaacgatctactcccgcgtatttctcacaccgtacgactcccaaatatacgtagatgagcaaacgaagaaatattaagatatatgcaccggagcaaaatatataaaactctgttctatttctctgtgttttctggaattatttgatttcctgcattggtagacattgtgatgaaaccttaaaaattgttatcatgtagtctgattcctcagtcattgatggtcaaaatactatatagaatcatatataaagtacttccttcgttttataatataagactttctatcactttccacattcatctagatgctatgtctatattcattaacatatatatgagtgtggacagtgctagaaagtcttacattatgaaacggagggagtacaatatattatggtgccctgcagaaacatatagcaatcaccttaaaaaaagtaaaatatggaatttaatattgactgatgaatttaagctatgtaccataccttgggaagtaaattattgtatacattttgttttgaagatcaaattttccaaggtatcaatattataagcagaacattatactggaccatgttgaactaattaatattatttataactgtattaaggcatgcaacaaatgttctttattaaagaaaacagtactggcaaaaactgtaagagaacatgtctagtatggtatattcaattataatatctagcaatcacccggaaagaagaaatatttaatctattgtcagataaaatcagaagatcaattgtgtatgtattgcaaggaggtgtgacatattactttacttaaacaccgtgggaatgcttggaatttatagcaccacgtcatgcgattttttcagaaaaaccctcctcctttcgtaaaataatgcacacgtccgaatttgtgttcaccgtacgatcaccatgaggcttgatccgaccatccgtgtggcttagctggcggatgttccactgccctcggatcggtggtttggcaatgaacggctcagatctcatgctttgaccctcccacacaaaaccctagcgccgcccagccgcccccaacctcacgccccaaccccacgcccgatggatggtgccgccaactcgccctctcgctgcaagacgatggtggcgccgtctccattccctcgccctctctctgaaggatggtggaggcgccatctcattccccggccgtgccctctcgccgcaggcaccatctccgttcccttcccctcacagtttgggtgtcgccgaatctcactggaattggttcgccaccttagggagttgccgggactggttcgtcacctctgtggcctgacgatctgctacccacgcactctactcctccccaggtcaactttacactccatttgcctaatcctcttaatcgctatgatcaatccagcctgcttgcttgtgctgattccatattcgctgttcaactcctctggtgaaggcatcagcagacacaatttggtacactactacttaaatccctatacatatctgttctagcccctgatctctattcttaacttgctgatcattgtgagttttacatgattggtaggaagcaaagaaaaaagggagtgcaggctagaatgctagattattcagtactaatgtttaaacatcaccgcccaggtacagatcaaatcctctccttctgtcctgcatatattgtatatgaattgaatatattgatattgttggagagacgagggattgcagttttcaggttgctcacatcattctgttgattgcttttatgtctacaaaagtttaaggattactgcaccagctgtctatgcgatacgactaatatcttttgcactgtaatagttaactgattttcttggtcatctgtatatgtttatgtacactatatgaatgtcgtgctaaataaaaatagctttatataggagcaacaaaatttttctatgaaaatattatagaaaatggatttgaaatgtatattgttatggattgtgtttctcaaccatcttctcctaacagtatctgtgcccctcaccaatagcctgcctatacaggctcactacaatggcccacgagatgccatggccacatgtgtggcggcgatggcagcatccaggcccacatcaaggcctgcgccgcgctgagagccatctccgttgtcaccgcacataacaccattagttcaggtatgctgccgaatttcctccttttcagtttgctctcttcggctgattggctcaatgattaggctgccagtaaatttctctttaacaaaggccttctatatgcttggtcaaattcttagcggcaaatctaagtttattctccaaatacatttgttcctgcaacttttttaattataatgtcctatattttttatgtcagctaacttctgcgtaaaaaacatttgttcctgcaacttttttaattataatgtcctatattttttatgtcagctaacttctgcgtaaaaaacttttcactaataatgatagaatattgaagatgacagtgcaccgtctatgtcaattaccaaaaatgtacaggttaaatatgtgtacatggtccttcataattgcatcctgatgtacatcggtacacgtaaatgccaattgtttctggaatcttaacaaatttggtctacaagaacatatgctttaaaaaactgttctttattattatcaattacgctcatttgggattgtacataaatgtatatcatatagtactacatggtagatgtgattttctttctcaagatatatacttcaaaatataaaaagttagttggagactacaagttttgatgttctttgcttagttgtccttttctgcaaaatgttattgtgtgaattgtgaagtaatgtcagtgttccttcattgtacaatactggtaataatatgttgtgagcatgtcagtgagttttcttgctgtcacctttctatgcttctgtttttaggtatggatgttttcttattgtcttttttggatgatatatgtggtcttcatatttcttatcagattatttaggtttagttccatgatagcatatcatgtttatgctatcagaaggttttacctcaagttctttcctctccaacaaatcatattttatttgttaattcgtcgtgtgctaattctgtacacagaatggcaatatacacatttgcattgatgatattctttgtcgatcgacaatcttatattggctattgtgatgcatacatcatcagaaattctctgtaagcctgacaatcttggcatattacacatatatttggatcatgcaattaattttctatgagacaaacctcaggatctttagggctcagaatagatagatgattgtgccgatattaaggtaatgatatgatttgatggtgcaggtcttttagcttcgtatctggaggaagctcaattattctatgaatcatattgtcaccagtacattgggtcaatattgggtctataagtcaagtcaaggcagtgatcacaaattatgttgtacatctagcaaccaaatatttatttggctcaattgaagatttcagtatttgtaagaactttactagaccgcgattactacatttttaaattcagtgcaggccctatgtataacaagctaacatttttcttatgctatagccatttctatatctgctactattatttaatattgaatttttgctttgcaaatacacttatagagttttcattgtaacctgacttcaaaatatgattttattacttttttaattcatgaaatgttatgtttgccccttctccaaagctacagagatatttcaacacggtttctcagaagagtatttgtcctacctgctatatactcattgtgtagtaatatatggtgacatccaaacatgccatgtattctgtaggggatacctcaaaattctatgccattatgcaaaggaggtaccaatcatctactaatttgttgtaagtacatgatgtgatgtactgctgtttttattgagctaaagcactaaatttttctttatgcatgctttgcgatagatgagaaaagattcaattagttctcatgatgaaggtatctatgagaaaatgttgcaattcccagatcacctaatgattgctgtttttactaacctataccctacattatgtaagatccattgtcctctgtcattgctacttttttctaagtgtacataattgtacaaacaattgtgtgagcaaacagattatattcacatttaaatcttggtgatagtcataatgtgtatatgcatatgtgggtatgcttcagacataaagttcttttagacaatgtttatatataattcttaaaatttacaactacagatactgtgttgttttgatcttagtaacacagcttgaaacattcatacccatgcacgcagcgtagcacatgattcttgctagtttacatgaaacttcctgctctagattagctagggcatggcctttggttggctgctaactgccgcagaggtggagtagatctgttttcaatttgattaatcagccgtttgatttggctgcgtgaagaggcatcaaaattgagtaaatgattatcactatttgcaaataacaacaccatggattgaactatgagaggaagcatcggagcagtggattgatcgatctcttgattgacctagggttgtggaagaaaatgaagattaggtgcaagactagagtgggacgcgcccccatcactgtaattaaagcggttgattggatgggctttacatcaggcccaccacgttaatgtagattagaatctataatcaatggttaggattatatgatgtatcaaattaacgatcagattttactggttaatgtgggagctcgtagaaagtgcccaattattataggtatagaagatttatatcaacgtaacaccctatttccgttttatcacaagtggcaaatgcatcactgcattggtggtgtggaagacgagaatatgatcacctagaaaacatattagcatagatcagcaacaaggtgatcatggaaggcttcttttaaaacaagtgatcatggaaggatcaagggtgaaagaatgcaacagcaacttaagagttgagataatctatcaatttagcaggcaaatcaggttttcagcgcttttcttcttttttaaaaaaataaataggtattttcccactgcgatcataaataataaattcaaaaatttggcatacattcatttcttacgtccctttctaagtacacatatttacgaggtcacaataatgcacaacttgatgtagttttgggatggtaccctgacttaattatgaccaggctatataacaacggatcgtccacaaaataaggtgcataaccataaatatatttgataactgcacacaagtccatctagataacaaaagtaacaccgatgcaactaagtgcatcttattcagcaaccgaccaaattaaagacgatgtggttttactttgcgtgaagcatatatacttctttgtcctcttagttattcaattaaccaagtagccatctcttgtttgaatctttccattgcaggccgtggcaacaacatggagatgacagttgacctctcacctttttcattcttgcacatgaattggtagcttgtcatatctggcagactaacagtcggtatgccacctccaatccgcttagcccatccaatatccaaagtgtcctgtccaatccattttatatcacatgtttcaaatattctctctacttttatgtacggtttctcacgccatagtggcaacaaatctaccatcaattgcatattttcctttgtcttcatctcgtgtttagccttgcggacaagttcaattgtatgccctaacgagtttgtgcacaagtcattaactgttatctcaatgacagggcacagaagcccattaccatagtatcccaaaggaagcttcttccatcttccacgcgcattcacagttatcatcaagcgtacaatctggcaaggcttgtagccaagtgccatagtacgggatcgccatagaacagcagttagtagctcaaagcttgtgactgtttttgtaagattaaatgggacatgacgccttagtgcaatcatgtctctttgagagatggtaaagtattcagacaccatgttttcagcgggcattgtcaccataatgtcgtcacaggtggtgttctccagttcatcaaataatttctcttgttcttccttgatgttgggtggtagacttgttgcgacaaagtgctccctttcccaaactggcaacgtggttggtttggcctcaccacgtgcaatatcaactatagctttcaagaactgaagtgtgccaaaggcatcagctatgcaatgacaaatgtgagttccaaggacaaatcctccacatttgagatgagtaatctgtcaaacaaaaacaaattctaatgaaaaaccatacatatatgagtaagtttgcgactgtaaaccatgcatgctgaaatgattttaagttataaagttacaactctttttttgcaacaacagatagcaaatgtgactgcaaacatggggtctctccatatatatatgtaaggatctaaatatggttgttcctatgacaattttcctaagccgtcgttcctaagacaattcataagtccccatatagcaaatgtgtcgttctctcaccacgaccattttttttaaaagtcactttttatattataaattgcataatttgcactagttaattttagaacttactattcaattgtttacaatacacattttataaaagaattaagataaaaataattgaatacctacttgaaagaagggatagtagaaatatagggtgaaaatgcctaaaccaaattagaaaacattgaaagttccaaaaaaccacaacaaatgtcaccataaccttaaaattcccccttataagacgaatcgttgcaaacatccccttctaataccccttggtttgaaattcgcccttatttcatatgaatgataacagacaacgagccatggtcgttactcatattgctagaggtaatgacacaacaactcacggcggccagcaagacagcatgtcgttgggcagcggtgatccagagttttcgctttgaacatggaggtcaccgaacataagctatcgcgcttgtctcgtggagtctggcggtagatggtttaattctttgataatttcaaaatgagaaagatgagttcgcgatgcaatcatttacctattaaaagttgtgtttggtattaacacacgtggaattgaaaaaaaaaacacgtgaacaagggtaaccgtggagaaatatcaaacaaaggtgaattaggaagaggtatatatttgcaaatcttaaactcgagacatcgacgatggtttttccaatttttccaaggaaataataggtcatattttagcaaaactgttttaattggctgctaatcgagtgctgtttcaaagcatatgtatctcgatataaaaaaaacatatttagtgcgatttatcacttattttttattgtcattttgctagattctttttggatatcggtgcaaatttcttttggtctatatcctccccaaagtatatctcacattttttagaattggcttgtgagtattgataagaaaaccaataaacttattcttgtaggagcatctactatatgttatgctctatggccttatataaatgatatatttttttacaaatcattatctaagccttacgtacaaatattttttgggtaatatattggatctagttctgggcacaatttctaagatgtgatcaggaaaacaaacgcatgcatatgtatgccgttacctagaattaacagttatgcagatatatattcaccaactacagatggagatttacaaacagacttcaatagttatgcggtctttgtgtagtgttggtggtaattagtttgtgcatcgcttcctgtatttttgcgctatttctggagcagatttatgttaataacttgctgtagcttctcaagcaaaagccttccattatataaaaaaaattgtatctcgagtcgtttggatactacttctgaaaaacattttgatcagttaatcgtgtcagcaacggtcaatccatccatgcatgcatgcagctggattaacatttacctgcatgtaaaacagtggcctcccaacgacgactccagcgtccccaacatcgcagaggaagctttcagcgccacggaacgtcggcaatggcggctcgccgaggtcctcgatccgcacgtccgcctccgcctccacgaacaccaccccttcgccggtgcactccacggcgagcctgccgcccttgggcagctcgcggaggcggccggcgatcgggtagtagtacaccagagcctccgcgagggccgccctgatggcatctcccggcctcgccggcttccgccgctcgccgtcgtccaccgctcggaagaattcgaggcatggctgcaagtagcggaggtcccagtcgtcgtcgaggtcggagagcggcttggtcccgcgcggcgtcgccctcgccggcgcgaccagctcggggtttccccggcgtgtcaccatgaacgagtcgagcttcatgattctatgtacgtttggatggatggatatatatggatgataattatctgtgtgacaacaatttgtgtaggtagacacgactggtgtactgtgctagaatgcagctggtttttgtctccccgttcttgaacacaaatagcatggaagggttgaatttatacacgcttgggaatgtatcgatcgatattcgtgggaagagcttcaggtggttttttttttttctagtgaagatgaagttacggaatgcaaaccaagaaaccattagcacatgaaaaaaaataagttataattattataaacttaaaaagtaaaattatttgatatttttaaacagttttttatgaaaaaattttcacacaaaacgcgtaaaatctatatgatcttacatagaaaaaaacaccatgagagagaagaaaaacttagttgcacacgctggatcgacagaacctcgctggcatggcacaaaagtacacgtactctcccatgtggatgaattaaacactacagaaaaattttgaaatgtgcaacacgacaccaacgaaaacgtcaggtcaacatttattgttcggagtaatgaaaaaaaaaaacaaaaagcagtatgctagtagtcgtgtgaactgtgttgaccttgaatttctcttttttttcctccatatatacatacagtttttagttgatgtcttgtgtgttcacacatgtcattgtgttgtacatctaaaataaattcacaagtttttgtgtacttatttgagggcacattttcatgtgctggtacgtgtggtagcgtactgccatatagtgtatactgcatagtctgcctatatatatagtactccgtacgtaccaattaagttacgcatggctcaagatccaaagagaaaaggaaatgccctttgtttattttaccatagaaaaccatgtgactagcttaaacgtgtttcttgtctagagtgggacgtgtaatctacgtggcattttgtttcattaatttagtttctcattggtcttccttttaaggcaagagtgccggcccggaagcatgttggttaacaagcattaataaacggaattgcttaaaaactgtcacaagttttttggaaaaaaacttttaaatgtaactataatatagtttgtagggtaattataatgtaattgcacaatagttatattgtaactaaagtgtagctgcactgtaactacattataatcttcatataagttaattagatataaagttgtatatattattttaatacttatatacaacttatattatagtggaatcatattattatagtggaatcatattattaatacttattttaatacttatatacaacttatataaagttttacttttaggctttactgaatttacttttatatgtctaagaagtaacttagtgaaatctaaaactaatttagacatatcgtaaaagtaatttataatttttcatcaaaatgtaatcatgtgagatcttgttgtaaatatttaattattacgaacacaataggtgtaatcgaattgtaaatcggatgagtaatttaagagaaaattttattttaagcatagatgataggaatatttctcctatttgctcaatggattaatagcaaccaaaactcctaaagtactagcacatgggtgtctcaagttatgactaattggagaggcctctccaattagatttaccgttttttttcccttttagtccctcattggtcttctttttcgatgcttctgttttttttaggccaataggcctaagaggtccttagaagcatcttgattgaatcaccagaattaaaagttagacttacacaacacagaactgacacacaaaggaccccaaatatatactacttaaaatgttagtaatggtggttgcaggattgtaaagagtatttcccaccccaaaagctaaccaatcagatgacagggctcccccacttatatattaggtccttgcctttccacaagcaatgtgggactattcaataatttttcccttcacacataggtgtccctcagctgttcaccgccccttcaccgtacaccgccggtctgttggtatttcctacgatcatggataaatccacaagtgcacgaaataccgttatcgcacttcacccatgagtatttccaagagtattgaatttatatttttgcaggtaaggcggcggaatgaagacatacttatatctttttaatccgtctataattaattcaccatagtctatacatgagttaggataatgattgataaagtagtggatacacacaggagattcacctttaaacgatttgtgccccttgatgagagataataccctactcctgtttggtggattggatccaccgaattgttttgacaatggagatcttggttgtgtcgatcttgtggatcacttgtcttgttgcccttgatcgagctccctgcccaccttctataggttgggggaggttggatggtagggttacaaggaggaaaatctagccggtcacgtcttcagtttcctaatctatatgaggtagtattcaaccggggttctataccctactttgagacataacgcaacatgatgactgggtcctactctatctcagattacatcgatgtagcccatcacccatatatagttggatatacaggttgtgtgggtactcgttactcatatcgtccacattagcccatgaaaccttcacactcgagttgtagttttctctgtgatttatgaccgatactaagtgcttcaatcttctctgatgatttcatgaatgcttttcttcttgagtccgtattatatcttgcaaagaggctgtgcagagctttccaaacaatttataaaataggcgaatcaaagaaatacacctattaggtgtagccccccgactatgtggtagttgagaaaaaaaaaacttaacatgtagttgtggatcatatcagagcttagcgcgggcatcagcatggatgcgggagggcggtgtcgcagtgctacaacggtattcgtgcgcttatggatttatctatgattataacaactaccaacatgcggcggaggcaaggtcacccatcagtagcgtggcggagtttaccgccatgtaggagaagccaccagtcggcgacggcatagtcgactggcagtggagacgaggtcgctcatcagtgatagtgtgaagtcagccggtgtggtggtgaggccactagtcggtgacagagatgagatcccccatcagcagtgatggagttggccggtgtagaggtgaggccaccagtcatttgcgatgaaggtagccagtggcggagagacgaggtcacttatcgctggtttcatcatagaacgccactagagacgcatgataggtgacgaatgaattttcgtcacgcgagtgtcacagattacgaaacgtgatgaaaaattcaatggttgtgatgtaaatgaaatgtcatctatcataaaatctcgtggtgcgagcccaacttcatacctacaattaaaaagcaataccttgttatttttccacacgttacaagctcacggcaagtctgaacctatcttcatttagacggtgtttagatccaagggcgtaaagttttggcgtgtcacatcggatattatatagggtgtcacatggggtgtttgggcactaataaaaaaactaattacagaatccgacagtaaactgccactactacagaaagcgtttttgcatacgggcggaatcgatcttcacatgcggttggccggcccgcatgcgcgaaatggtctgcaaagatcaccatttgcgcatgcggccgtcgcaccgcatgcgaaaatagatcttcgcatgcggtccatctaagaagccgcatgcgaagatatattttcccatgcggtcgacctaacaagaccgcatgcgaagatctattttcgcatacgggcgtcttaagtagaccgcatgcgaaattcaatttccgaatagctaaaataatatttattctagccttttggtgagatgtgtctcgtaattaatattaaattattgagggatttattatcgtatttcggagtagtaagcatataagataagacaagtgccgcagtaacaaacatgtaatacataaccattaattcaatcgtaatttacatacgaaatatataatacaagtggcacagttttttcatcatgttattgcatatgtataagtactatacatgttattgcatatgttctttctcccactctctgagaggtttaaatttatcgtccattgcgagttcactctggttgtcgtagaagagacctcttgcgttgcagacatcgtgacggatgaatcggcagaggtcagcggccacgttcaagatagtagtgtcgttaaatcgttgtgcaatatatgggatttcggggatctgcacacagaaaggaaaataaaatggtacttagtgagaagtgtgtgcgagatgggtttcttcgtagagaagagttcgatgacttactcggttactggttgttttgtacctcccatttactctgagcatctcgcacacgtaataaccacacaagttggttcctggtggttgtttgtagcactgcgatataattatggagaccgatctcagtagatatatttagtatatatgtactgttcgataattagttgtattggtataaatttgatagtaccggccagccaatcctgacggataacttcttctgggatggaatatgttctggtccacctcttttgcggtagtacttgtgtgctctgtttgaaggaaacaattgttttattagtagttagaagactggtgatcgacctaaacaatttatagtaatgaaatgtttatcacttacaaattcaaaatagtgaggaattccataaatgtctccttgtcatagtgtgcggggtccaatgatatgatcaattggtctttcggatatacaaggaataatatgtagtggtctctacatataagataggcttattggagatagaaaattccgaagaagataaattaattaaacaaaaggaagagagagcttacgtgaactggtaggggaccattaagacatctttgtcggcgtgcgccaacattgctattgccaagtatgttgctacttctagcttcttcctcttgtgcaatgtcttcacatattcttccttttcttcaggggtcttgccaaccaattgctcgcagtcctctctcagctctacggtgtgttgtgttttgcatattcttgttggatcgacatatccaacctttgctccagttctatcagcttcgtggaattgcatactgtacaatgaataaagaagaaatgagatttggtttatttgtttcgaatgaaacgtgcaacatgtaataaagagttcagacttacagacagaaagccgcaacgagattaacgtccattttatctagcttgtagagggcgtaaaggtctcggaaagagataaaaaatatcccattaggaccactcatgaaagtgccttccaggacggcaacgcttatgaaaccgagacctttcctagatgccttcatataccattcgtgcattaccctcatttcccatggtagcttgttcataagataagttggcaagaatggcttgccatactcataagtttcaggcacatcggcagataaccagtattgcacttcatcttgggccgctagtactgacttctgggagtctgacaagacgtgagcaagttcttttctcttctcagaattcctgaaagctgaaaacatgaacttctccttatccttgtcaatctcctttgggtcgtatgtcgatatcaactttggaattatacgacgaggttccaaagtattagacttcggttcggatgtagtaccatctggtatgtgcacttgttctaccagagcagattggagtgtaggtggagaggtttgaactcagggcggagccgggggtgcatgctgtttagctggggaggtgggagaggcatgaactggttgcggggccgggagaggcggttgttgagaaggggagggtggtggtgtaggttggcgaggcggtgacctaagcggtggtggtgacgacggatgtcgaggtgacggtggttcaggaggcaacggtggtgcaggagcggcagctgtcattgcctgcgatgaggatggggttgaagatcctgctgcagggacggccgcgctcaggattatgtctctgcggtgccacaagataaactgattcactgcatcaccgagaagttcaatcccctcaggtgcaggtatgtctagttccaaggaaacggggtcgctatggaccttggcgacctgtacacttgcgtaatcctcagggattgccgtgttgtggaattgacgtccgggtatcgctaaacccgttgcaacctccttagtctttccagcgcggccgattggtacgacgagactgcacggagttggtccagttatactatccacagggaagggagttgtctgcactgagcctacactgctgggtacattagttgtttgctgtgcggattgcgtgggttgctggccatcagtgaataaccttggaaaggctgtcgggttttcagctgccaacgagtagaagtgttccttcacttgcgcatagatcttgtccgatagttgttctttgtatttgtctctcttcttataacttggtgcgtcttgtggaaacccgaccttccaactttctttgaggacaaaccccttacacgtccagagtgttcagccgtccccaacgccgcagtaagctgatctcgctccctccgtaggacgaactgtcctgatctttctttctcgactatctgctgcaaattagtagtcacttcttctatgtctggagtctcgaatagtatgtctccctcatccgagacttgacctgtgctgcgcgcccaaacccagttcttgctacgttcaaccatggggtctacaagcaggggcttaccggccgcggcaaatctttgctcgatctcccgccattgatcgacgtgaccagcgtatccgctcgaccccaatctatggggatatctattcttcttcgcgagctcggacatttttttcctcaaagccaatgcttcagctgttgtatgatccgcaacaaacgtgtcccagtcagcctgcgatatatgtccataatccgtaaacggtgggagattcttctgaacataatcccgatttagatcggacttccactgtcgccatcgatctcccatctttttaagtgcgtaatctctccccctgacctctgatccaggagggaacacaaaatacttctgcaactcattccagagaagtgtcttgatgttgtcgtccaccgtttcccacaacttgacattaatgggacaacgcgtcctgactagagtgccacaggcgttgctgaacttggaccgtactatcggtggctcgacgggcttcccatcctgatcgagagcaatcacgttgtaagtttccttgggtaatttattcttgcttctctcaccacgtctttttttcccactcccgcctgcacttgtagatgtctccgtacgttcaggtgcagacgtagcggtgtccatctcaacttcttgctctgtcctgttcctcccggctttacgtttcgagcggcgtcggactaccatctgcacagaataggtaactctatacaccattaggttcatgtcacatcatagttagggaataatacatggctaacgattttcagcacttacggcctgttcgataggtatgtagtccggatcatcattgcggagggcgacttgtgttatttccattggaaacgggtcacttggtgtgcgccacgtttcttcactagaagcgtctcgctgcttattgctaccggaattttgaggagtgttaccttcttgaggcgctattggtgcgttcgatggaacattttcgttcgacatcttccaacttgacgtaaaaaaatttgacataagtcccaattttacttaagtcccaatttaacttattttcacataagtcccaataacttaatttcacataagtcccaatttaacataattctcaatttaacataagtcccaatttaaacataagtcacaatttaacataggtcccaatttagcatcagtcacaattaaacagaaatctccatttgacataggtgccaatttaacaaaagtcccaattatacataaatcccaatataacataagtctcaatttaaacataagtcacaatttaacataggtgccaatttaacaaaagtcccaattatacataaatcccagtttaacctaagtcccaatttaaacataaatctccatttaacaatccacaattaaaccttctcaaaattaaacaatccacaattgcacatatcataatccacgatgcacaattaaacaatccacaatccacaattgcacatttcacatttctttttttaaaagtaaatgttaccgagcgacggcgacggcgagggggtagaagtcctggcagcggcgtcggcgacggcgaggggcagggcgacttcggggaggagccggcggtggcggggacgacctggcggcggcgacggcaatggcgatgggggagaggtccgtgcggcggtgacggcgacggcgagggggttgaggtccgtgcggcggcgacggcgacgacggcgaggggggagaggtccgtgcggcggcgacggcgacagcgaggaggtagaggtcctggcggcggcgtcggcgacagcgaggggcggggcgacttcggggaggagccggcggtggcggggaagacttggcggcggggacgacctggcggcggcgacggcgacggcgaggggggagaggtccgtgcggcggcgacggcgacctggcggcggcaacggcgatggcgaggggggagaggtgctggtggcggcggcggcgacggcgtggggcggggcgactttggggagaagccggtggtggcggggacgacttggcggcggtgacgacggcgacggcgacttgggaaattttggcagcctggcggctagggtttcgcgggcgctgggacttagaaaattttggctccccgcgctccctatatataggcgcagatcatcgcatgcgggcggcttaagggaccgcatggaaaaaagatctttccatgcggtcgacataagccggccgcatgcaaaaattatctttccatgcgggctatttagccagccgcatgcgaaaaagatatttccgtgcgggccgtaaagccggccgcatgcgaaaaagatctttccatctggctggcttaagtcgtccgcatgaaaagatctttttaccaaaaaactcatattttttagttcctctaagtaaactgtacatatatatatttttcccaatatttcaccacaattatacattccaaatgtttttggcactaagaaaactcatgaaaattgctcaaaactcgtaaccaaatgttacatgctaatgattacaacataagggggacctaaatttatgcacgtatatttggaacacaatgagaactaaaggtcacgaaataactatgacttaataaccttggcaacaccatctgctcgaacgtacgacatattcgcttcatcgattgttctctcaaccttcttaattcgcataggaagatcagtaaacaatggtacttcatcgaactggttgtaatcattggggtcttcgatgttgtcgatgccgatgatctgttgctttccggatatgacaatagtttttctttcatctgaagggtccttcacataaaaaacttgagccacacgctctgctaaaacccatggatcatccttgtggcctgttttactgtaatcgactatcgttagcccgtagtcatcaacggaaacccctgttgtgtctttaacccattcacaatggagcacagggatctggatgtttaggccatagtccagttcccatatttcttgaatagtcccataatacgacctcttttctccactcgtgtcaatcgcttcgacacggatcccactgttttgtgcggtgcttttcatgtccttcgtagtcgtactcaaggtaaatctattgatgtcgtaaccttgccatgaattgacaatacttgaaggcccacatgccagtctttgtagagtaagttcctccacagaatcaccaactggcaggtttagatatttcaaccacagaggaaagcgacgcttgtgctctcttgatatccaatcattggaccaccctgggaagcaggctttgatttcttctaggtgtcgctcaatgaatggctcaacgatagcgagctgttgaagaacgctgttgtgtgccgcggacacctttttgtaatcattatcgaagaactgcttcctaccaacagtaccccttccagacaatctaccttcatgttgatgaacaggaatgcaaatggcattagcatcctttatgtagtccatacaacactcgactgcctctttagttgtgtatccctctatcattgatccttccgggtgagcgcgattgcgtacatagcctttgaggatcgacatgtaacgctcataggcccacatctgatgtaagtataatggaccaagttcaataatctgagggacgatgtgaacgatcaaatgctccatcatatctaaaaatgatggtgggaaatacatctcaagctagcatacagtctcgacggcaaatgtctgaagcggacctaattccagaggatcaaataccttctgcgaaattcgattgaaaaagtagcacaactttgttataaccacctttgtatggactggtttgactgcccttatagcaattggtaggaacaccgttagcaacctatgacagtcatgcgcattgtatcccgaactggttaaatccttcattgatactagcttcctgatgttcgatgcgaaaccagtaggcactctaaccccttgtaaacatttacagaaggcttttttctcttcaagtgtcaacgagtaacaagcaggaggaatctcggtcttcccatttggcagcactactgggtgaaggtcatgccgtatggacaaatctacaaggtcgttacgtaacttcaatccatccttcgttttactcgggatgtccagcaatgtgccaacggtgctatcaaacacgttcttctcgaggtgcataacatcaattgcatgtcgaatctctaggtccttccagtaatctaagtatttgaagaaaattgagtgcttcttaaaaggcgacgcagtaccgttgtcaccatcagctttcttcctctttacagtcttcttctttccctttccatatataaccttaatcttctttgttatctcatacacgtatgtaccacctcttgctattggggcagtgtcattctccactgtattatcgaacaatctagccatcttacggtacctatgtctttgtggtaggaaccgtcgatgtcgcatgtacactgtcttcaaagacgacgtcaggtatttgtatgaagttttctccagacatatcagacatccagtcttccctttaatctgcccagataatgaaaagtttgcaggtaggtcattgatggtaacgaatatgatcgcacgtagattgaagtgctcccgcttaaactcatcccatagtcgtaacccctctttccaaagttcctccatgtcctccatcaaaggctcaaggaaaacatctatgtcgattccaggttggtttggaccttgtatgaggatagtgagaagaatgtactttcgtttctgacatatccatgttggaagattatacattgtgagaaggactggccatgtgctgtgcgagctgcttaagtcaccaaacgggttcattccatcagtgctcaacgcaaaccttacattcctaggatccttagcaaattctgggtgttttgcatcaaatgtcttccactggcgagcgtcggcgggatgtcgaatcataccatctattttccggctctcttgatgccactcatcaactcagcatcagtcaggtttgagtacagacgcttcaggcggtccttaattggtaggtaccacatcaccattgaaggaatcttcccgcgcttacccttatcagaatctggatcggtacactctgaatctacgggcccattccccgttttataccgacttgtgccacacgttgggcaacattccaagtccgcatattctttacggtataatatgcagtgattcttacaagcatgaatcttttctacaccaagagataaaggacatatgagtttcttcgcttgatacgtgttcgatggtacaaagttaggcttaggaagcaacacacgcaacaaactcatcagatcattaaaacttgtgtccgaccatccatgtttagccttcaatctcagaagttcaagcactgaacacaagactgtgaaatccttatcacatcccttcgtttcatcgtaaagaagatccttcgatgccttctctaatgcctgccaattctccaatcctcgtgacctgcccgctagcacctctggttcaacatggcgtagcatatcctctaaatcaaaaccaccatcgaaatcatcactatcggtggaaacatcgacatccattctttcacgcgacatgtcttcgattataaaattctctgcctcattcatctcgaaacttaactcttcatcgtcatcttccagattggcgaattccccgtgataggtccaaaccttgtagttggcggtgaatccgtactccattatgtgacccaatatttcaccaggatctaccaacaatttctgattcttgcaatgacggcacggacaaaagatctttgtcatattctccctcaaagcatgcgccttagcctgatcaataaatttagatacttccttaataaatatcggctgcgttctccgcatctcatacatccatgacgaccgatccatctaattatataaaggcaaaaaagttacagataaaaaaatagaccgcaggtatttcataaaaaagtttaaatgcatttgtctcccaaaaaaaattacaacaatacatgtaactagtatgtacaagtgattacatgcaaaatttgcccatcaaaacatatattttgaagctagattttgcaaaaaatagttagaacaaaccttgtcaaaatattaaaaaaactccactttccaccaacgaaatataacaaaaatggagccaaatgaaggaggatagatagttcttcacctttcgtatagagttcaagcaaaaatttcgagttgaaaccccccctaattggtgcttgctttaggagagagaaagcttcgttttcaaatggtcaagctcgggcctggagaagcatatatggccgatcatcgcatgcggtcacttaagccagccacatgcgaagatccattatcgcatgcggctgcttaggacagctgcatgcgataatgggcctattttcgcatgcggctgccccttaagacggccgcatgcgaaaatagacctagataggtaggtttgctcgagcctagataggtaggtttgctcgagcacggctagctcgttgacagccctatacacgaaaatggcgacatgggctgcagggggttgacttcatgtcagtgccgtgacgttatttattacgtagtatgcaatgcaagtggttgaaaatggaatagtgtgaggtgtctcgagggtaccggcgggcgcctagcttgtgcttatcgagggcatgtggcaatttggcattaacggatttgtacttgcattgaatgtacaatggcacgatgcagtaaagtatttttcaatttgctgtgtttattatttatcatgtactacctcctacccataaaatttgtatttctagaaagttaaagacatattaataggatagataaatgactacaataaccttatttaatgaacacggtagatgtattcatgtaatgaattcaagtaactcatgcaatggaagaaaaggtaagcagctttttttaccaccatcgcacatgtataagcccatatacactggcttcgttcgttcctgggagttccaggagattgagagagaaaaacatctcgttttccgcgcgcacgcttcccaaactactaaacggtgtgtttttttaaaaaatttctatagtaaagctgctttaaaaaaatcatattaatctattttatttttaaaatttaaaatagttaatacgcaattaatcatgagctaatgactcacctcattttgcgtatcttcccaatctcctcaatcaccttctcctcaaactcacccttacttcttaaaaccagcatgacagtgtctcgctaagtcgctatatgagttgtctaaaacttaaatttgtgtgattgtaataacctaagctacgtatctgtgcgtatgggtttctatcctccggttcggtgtttattaagacaaatcttaattagcaacaaactgtgattaacaagaaaattcttcttttaattttgcagtatactgtattgtttttgcacgagtacgcattaagttatgccatccaaatatattattttggaggtgcggacagagatgatcctcgaggttaaggattgaatcgaatgcgacagaagactgcatcgctgtaacagcgaaacgtacaacgctgtcgatcgcgccatcaattcatcgatgtcatccgcaacggcatgcacccccgtgcaacacgcctcaccgcgggcatatgcacgcaggcagctaaaacgacagcggtacgcaaaaaaaatgtaatcttttcttttttttattttgaagaactgacggctggagtttctcctgccagaatttatagaagaagagaattggcctagttaataagagaaaccgggtcaaaaaccgaacatacatggttaattaaataggaaaccggcaaaaaaatatacagaaagggaaagggaaaagaaagaaactactgagatatcacaaaagtcgtcgttgccgagcttacagtggcaagcagcttcgacaacatataatgcaaacgaggtctccagaaccaccaaacaatcaccagtggagtaaaaaccttctgagcgaagcctccaacaagggaacaacaccaaggatgctgtcaacgctcgtcctgaaaggaacttggttttcacatgaaggaagagagagccagcctgacgatacctcaaaggaggaaacggcgcccacaggcgtcgataacgtcagcatagggtagcattaggcaaggttttcacccgacgctctctcaaaatgctccacctccaaaccctcgtcacgttgccgagacgccagttgagggtcatcgttgccaagcttgcaatgacaagcagttctggctcctccttaacagtcaattacactgcagctcaaccagagaccacctcatacacaggaacccagcagcagcaaacctacgtcgcggccggcgaccagcaaggaaggacgccggaaaccaactccgcacgccacccctatcgaaccaaggagctgccagcaacgactggaagcagccttgcctaagaagggaggagcacctgagaaaagaggagcgggcactgcacttccagtgagcgctggaagaacaaccaatgaagaaggggaagaaccggattcggaggaagagaagggagggagatggaggcaccgtccccttcgccgacgaaacccgcagcaagccggcagctctcggcaactccacacggcagccggccccaaagcacgccccgtcgagaatcaaaattgaaaaaaaaaagagaattaaaaaataattaatattatttaattttagtctaaatttaaattgaaattctatatcatgaaaaataaataattacatttttagtcaaaaaaataaattcatatcatgagaaaaatctagccaaatttgtagttcattcaatttagttggaattaaattgataagcagtcataaacaattaaaatggtaccatgctatttctgaaagtagaaagatggttaaaattactgagagagaaactgatttttccaagcccaaacttgcaggcccatttggaggcccaacagccggtggcccgatgtgggagaagccagagccgtccgatcaaatggacggtccagattgatcctagcccacatagatatctgcaacgaaaaccctaactctaaatttcatttcccttccccccgccccccgcccccccccccccccccgatcccctctctctcaggcggcagccttcccctcgagcagcggcgacctccccctccgagcagtggcggcgacggtggtggcgccctccccccaccaccatgagtgactatagcggagcccttcccccctccccatgagagacggcggcaacgacgcgatgacctcccgcaagcggtggcggcaccctcagtcacggcgagcggctgcgacggcactctccccgactgcgagcggcggcggttgtggcgccgctccctctccccaccgccggctccttctctcgtcgtcgggcggtggccgccacgccactccttgccagatccggcgggtcgacggatctccaactgctcggcgactcgggatctggcccctccctctccctatcggcatccaacgcaggggcgggttggcagcttggcggcgcgatggcacggtggatccccggcacaacgtcgggtcatcggttcaagatctagccttcgagttcgcgacctccacggcagcgaggtggcgagaagcagcgcgcggtggccttcggcttgcccctccctctcctctcgtcatctgtgttaatattttggattttttatgattccaatttagattaggactgggattttgtttttatttggattgtgatgatttgagatttggagttatttgtgtgatgatggaattctgactgggatttttttttcttgggggggggggacggacgaaaaatcaccgcacggacgaggtgatgaaaggaaaattacgaatattttaattagttaaggtacggtttagttaagatgaaattcactgtgggaactcgttcaaatacataactatttagaaaatcatgaaatgcaattaagagtctgcttgtctcaagttagaacgcaagatttttaaagagattttttatatgactcctttcgtatatacaaaagcaaacgaatttaaaaactgactcaaatacgaataagtatttccagaagcgcacaaacttaaaaaccgactcatacacggatgacgtaccaaaataccagcggaacatcttcaaattttataatactagagataggtgagatttccttaggtaaaaagtggaaaactacggattttattccggattttacaggttcatcattttcagtaaaaagcatttttaatggcagttttcgcctgtaaacatctttttttttacttattcataaataagtaaactttaaaaatctatagaaaatttattgtaaatgtgtttgagaattgaggtgaactgaaattctctatattctctttaatatacctgggtccataatttctttaaatacttcttttaatacttgggagtatgactgttcatttatgttatgtattctagatgagatggtatgttaggtaactaatgaccatactacaatgaatttttaaaaatatattaactaggtcatatatattgaaggaaatactgtaacaatcatatataactttggtttaacttaattggcttaatacgaattaggattttttaaaatttggacattccaaaacccctcctaaaagtatataccatatcagattgtatcgaatatttcggctaataaatattctcacatacaaaaaaaattaatatggtcgagttatagaatttttagtatatagcatgtctctatccaaggttatttggaattaaaacaagaaaaataattaaaaatagatatgaaaatttgtaacgctctttgcccccatgaaaaatcttaaatgatctaaaaacttttaacaaaaaaaatatagatcgcatctatagctttaatttgcatattaagtttgtcgtcgtccgagtttggatgaaggagttacgttttttttatttgcatattaatagattttttttttttactggtgaaataagtcgggaggtgattgcgcaggtttcgttatgaggaggagaaaagcatcagcgtgtgcatattcagggtgctgcctgcgagtgtggaacggcagagctaggggagaagctacaaggaggaaagaccgaggagaagagataaccttggcgtaagatgaaaagctagtccgtttgacgtctcggaagtgaaaactgttacagctgttcacctgggtgtgcctgtacatacaatttgtgatgcacggacatattcaatagtagagaaatgatcattagtaccgttctaaattatcctttggaacggttatagtaatcgagacaaaaaaaaaaccatggttctaaaccctctttaatcccgattgttgtaaccaaaactgaagttgttactaaaggatgtgagacctgaactcaaaatctctcaccttagatcgtacgcgcttaccatcccacttatttcacacatttgacggtgcggtggatgaagatgaggaaggggtggcgtggtggaggggtgaaggtgaccttcattgctatcttcaaggtgaccttcattgctatcttcacagcctctcctcctcctttccatctcctgatggcccgcacgtcgtcgttgctctctctgtctctccttgatctcaagcaaacaggataggcgtcctatgacgacgtggctcacgtgtggcctgcaattagttatccaccgatgcgcgcgatgggttggtccactcacgtgttgttgttcactgacgtgctcaccttcattgtctccacattcatcatggggttcgtctctagtctgtcattgccgtcattgtcgttgcctcttcaacttgattctgacgatggtcaggatgtgcgtagatgaggcaccacctaccccgaggacaccctcccaaattaagaaagggtaggagaaggaggcctcctcatccaccaattttgccggcttcggcctccacatctcctttcctctatcccgctacccactgctggacaccatggagttcgccacaccccggtctcctgcgagaacaagagtagcgcggaggaagtagaaggggtgaaaaatactagaggcttacatgtgggtcccttttacgagagagatagagagatgggaacctgacatatggtctttagggtatttcagaatatttacgtggttactctctcctattcaatcataaattaataacctaatgggtgtggtatcttgagctaatttccacgtttactagagtatcttcccccataggttacttcgtgtggtatcctatagctaaaaccacaaagtcataatatatcctgtaacaaaatttgccattgttttaaataggacgaatggtcaaacgtcttatcataagtccacaacatcgtctattaaaaagtgcacgaagtattaggttcgtagatggtaaggcgatgcaataaatttgaaagcctcaccagtcaccaatgatataacatgtggtaacttgaacgggaagaagctaaaattggttttagggtgtgtttagttccacgtcaaaattataagtttgactaaaattggatgtttgaaaaaaaaggttggcagtttatgtgtgtaggaaagttctgatgtgatggaaaagttgaaagtttgaagcaaaagttgggaactaaacaagggcttaatggactagccttcactgaacaatttgcaaccttctatagtgtaagatacattggaataaaatttgaatcaatgaaacactgaagttttagctaatacgtacgtgttacctaaattaattttagaatttgggttgctctctagctattcacaaaattatttatcttataagtccatttgtttcttttctagattgagaatgcacatattacccaacaactgattttaagaatgtccggtagcaatgcacaggatatatcctctaatttatacataaattgaatgtgcaatgtgttgtaaagtatttttcaatgagttgggtttattttttatgatcttttagcttcttattattgattttagttattagctcttttttttctgattatcggttagctattgaattaatgcaaatcaatctaatacaagatgcaatagaaaaaggttatagccagtaatcagctgttttctttaaaccacattaaaaacgtcaaataaaagtgcgcgcatgtactcaccctgacaccagcgtagtcacccagctatttgacccgaaaaataattaaccataaatacgatcattgaggtaagtaacttgaacggtatagattggttcccgtctacgaacctaaccagttgatatatatgtttaaccacgttttctttcctcctgttcgatcggtctctttgacagaaatcttaattagcagcaaataaagatgcacaagaaatttggctgtttggatggattactcattttaccaaacttctatgccacaggtgttgtatgccatagtttttgtggcactaaaaaaaaagagccacacttctggtaaatttttattaacaagtgagtgtatgacatatggaccatgagagtagaaaagtgtggcatgtcaaacctttggcttcaaccaagcatttacacacaaaaaaaaatcaaatttgactaactatagtgtggcaatgtttagcaagcaaccaaacagccccgtactctataaagctctccttttgctccacgtatatttgttttattttgaaagagtgcatcaccaccaagtgatgagaccatccaaaattatttcggtgccgatgcccgatggtcctggagggtgaaggggccatgcatatgcttttcccattttcgccgggcgtcgtcgtgaccccaacaagctagcggccaatgcaacacgacgttgtcgacgatcgcgccatcatatatactgatctcgatcaatcgatcgatcgatttgtccgcacgcgcctcaccgcgcacgcacgcaggctacgcgccgcaccacacacgtagggattgtgatgagccccgtgcatcacgcccggccgcccggcctcaactggacgtatgcgcgttgtttctatttgcggtgcaaaaccgtcacagagtattacgattcgccgtcgctaggtataaattggtacttcctccatttcataatgtaagattttttagcattgcttatatacatttagatattaacgaatctaaatatataagtgtgtttagattcattaacatctatatgtatatgaggaatgttagaaagtattatactgtgaaacagagggagtacgtagatatccccgtcataccggtacgtggaccacgagttatatgtatgagtcagtatgaaagtatgaaacgtcacaaactaacaatagaatggatacatatccatcacttctctcctgcgtgcataggctgggaactcctatagttggctctcacgcgccgccacaagaagtcgcgcacacgatctgtttgggagttttaatttctttatcactcatgttttttttctagtattaacgttaaatctatagttcgattaattagaccttcctctttaattaaccacactatgccctgttaaaagttctcttcgtcttccaacttaatgatttaaacatgagtaatatataccattaatttctcccattttaaatttgaaaactctaagtatatgttctacgactaaaaattttaaaacatcacccaaaatttttgaactttcaacttaaacttgaaaacatccaatatagattttgaaactttccactcatgatgcgaaacattcaactcagagtttgaaactattaaaacttccaacttagaacttgaaagtttctaaatctagcaacttaaacgttaaaactcaatactcgaaattaaaaacttttaacttgagcttttaaactttcaactaaaaatttaaaacatttaactcaggattgaaaactttcaactcagattttaaacctttcgactcaaatgttaaaacttttaattcaaattttgaaatcaaaattcttccaatttcaactaacaaaaataaaatattttgaaccgtacttctaactttcaagtcaaatagataaaaggttcgtattcacgtcatcaaatttgtatcccatagttgagttgtttaagaaaacacaagccaaatcataattaagaaaaaagaacaatgtgcacgctggtccttgcatgtggatcaaattaacaaaggaccatgagacctgggcagaactgcatcatgtggagatcttggatgcacaggccgcgttaacatgcaaatcagactccattcacgtgggcttatagagttatgggccgaaaagtgcatgtaatttagattgctggcgcgtttgcacgaaataggtctcgtcttgtgcgttggcatttggcaatgctgagctgctttgcatgttggccgttactaatgctgcgtgctacgtcctaccatgtttatcgttgttttttttttaatctaaagagagagtttgtattagtgatggaaatatgggttacattcctagtttaacagatcaagaatcgctgtaggagcgcacagtctccattcagcgcaggacctcgacctcattgccagttgagcaagaagatgagccaccctattagcttccctctttattttgcacaccttgacacttaggagacatttcatcacaccctttgcttcagaaattgttgctgcccagctagatcgagacgacaggtttttcacaagggctgttgcgacatcaacattctcagtctccaaaattatcggcactagccgtcaacctatgcgttgcacgggctattgcttaagcactatatgaattaaactattagatatgccagctattttaaattatcttaaaagttgtatgcaaactttgttttaaagttcaaatggttttatttcaattcatttgtacttacaaaaatcaaaattactatttcaggtcagaaaatatcaaaattgttatttacaaatacctgtagaatccttcataatatttctcatgctactttttattttgttaatttaataatttcaatattcaaaattagaaagaaccatgccgtacttatgttagaattttaatttagtattttgtataatttaatttggaaattaggtattagtaagtatcctgcaattacaccttttcttgataaaataattttaaaatttagaattaatatatattgagtagtactctatttacagtctcgattacactttcccaatatcattctaaagttagcattaattgtatatatggtggcaattaaatgcaggatcatacttagtgtgcatttatagactgacgtttaataattaattgatattggatatatgaaattttacttgtcataaactccaattctaatatcttattaatttcataataacatggaaattcaaatttataattagaaagtgctaactggcattggctcttcttataattttaactttgtgccacccagatagatgcaaaactttgtaattataagataatcaggcatttagtggacactgaaaatttgactcaacataattgggcatttagtatcaatcctcttccctagctctgctgcttcaggaatatccactatgttgcatttgttgattattatttttaataccctacacacaggtaatattattagtctagctttttaatcaattgcacacgctaagccccactgtatctagcccgatcgtacagcacgccatgcagcagccagagtgaatgcatgtcgaagtggtacagatagagcgggcacaggtagagttcgctgtgtcgattgtgctctcgagcgattgactgatctcgtcgctggcgtccatcagctaacagcatcgtctagttctgcgtcgtcgttcccgagccacatgcgaagtctcagacgacggcaccatgaatcgtgtttatgcatggggaattgagatcgatcgtccatctggatatgatcatatacatattatcttttagttttcgcggataagaggagattgatacggcaagggttggatgggctttaaaaaaaggcccacgtgagatcttttaatctatggtcacgattgctttagtgtcctaatcaatggttagatcttttcagttaacgtggaagctcgtagaaagtgcccaaggcaacggtccgaccgttcgaaaaataattaccattctagctacaagtatattttttggttgatttgtgcgcctatattaatttcagatctgtgataatgtggaatacttggttattgtaattctgatcgtgatatcagcagtttcagcaaaagtgccatttgttcagcttgatggaagtttggtttgtcttaatgttaggactggttaaagtaaactaggtactattaccctggtagtctagtcaagtagatactgaaccaattgggagtttggaacatatcagtgtacttatatatacctctttaaatttcatagatgcgtctcttaatttgtgcagcttgataagggttctgcctttcgcttaatcttactggaatcatattgtccaggaaggcatgcatgtgagcatggatatgtttgtgggatcaatgccgctgtgtttagttccaaagtttttcttcaaactttcaacttttccatcgcatcaaaactttcctacacatataaactttcaatttttccgtcgcatcgttccaattttaaacaaacttttaattttagtgtgaactaaacacagcctgagttatatgttagatccatcagtggtgtttgagaggcaaagggtcaagagaaccggcagtccggcaccttagaataatcttctcccgaacagtttcatctgaaccatatataggtatattattaaagggtgtgccagatcgaacaacaatttgattatctcataaaacaccattttacaaggtcacaataatgcacaacttgatgtagttttgtaatggtacactgacttatgaccgagctatacgataatcgatcctccacaaaataaagtacataatcataaatataacacactggtcaccaaatggaaaagacctaactaattaaatgccatccgcgcccaagcccatctgaataacaaaaccaacaccgatgaaactatgtcttattcagcaaccgaccaaataaaagatgatgtggttttactctacgtgaagcagatatacttatttatcctcttagttattcaattaaccaagcagccatctcctttttgaatctatccattgcaggttgtggcaacaacatggagatgacggttgacttttcacctttttcattcttgcacaagaattggtagcttgtcaaatttggcggactaacagtcggtatgccacctcctatcctcttagcccatccaatatccaaagtatcctgcccaatccattttatgtcacatgcttcaaatattctctgtacttttatgtacggtttttcacgccacaatggcaataaatctactctcaattgcatattttcttctgtcttcatctcgtctttagccttccggacgagttcaattgtgtgtcctaacgggtttgtgcacaagtcattgactgttgtctcaatgacagagcacaaaagcccattgccatagtatcccaaaggaagcttcttccatctcccacgtgcattcacaacaatcatcaagcgtacaatatggcaaggtctgtagccaagtgctatagtacgggaacgccatgtaactgcagttagtagctcaaagctcgtgactgttttattgagatttaatggaacatgacgccttagtgcagccatatctatttgagagagaataaagtattcagaaaccatgttttcagtaggcattgtcaccataatatcatcacatgtggtgctctccagttcatcaaataatttcttttggtcttctttgatgtggggttgtagacttgttgcgagaaagagctccctttcccaaactggcaacgtggttggttttgcctcaccacgtgctatatcaactatagctttcaagaattgaattgtgccgaaggcatcagctatgcaatgacacatgtaagttccaaggacaaatcctccacatttgagataagtgatctgtcaaagaaaaacaaatgttaatgaaaaaccatacatatatacgaagtttgtgactgtaaacaatgcatgctgaaaagattttcagttataaagctgcaactctgtttttgcaacaacagatagcaaatgttgtctgtagttaattaaacatgggatctctcaatatatataaggatctaaacatggtcgttcctatgacaattttataagagaaaatttgatccatagcacaggaaagaaagcggtactaaaaaatagcataaaaagtttctactttcgatctatagcataggccaccgatttttcttcgccctgtagcacttccgtcacattttgaagtaacggcgttagatcggagtggagaaaattttcgtcggacacatttgcccttcgttccccacgttccccaccaggtctcctcttccgctccctcatggatggcggcgcgcggcgcccgccaccgccgagtgagctgcgcgtgcgctcttcaacgatgtgggtgcgtggctcgccgttgccgccgacgatgaggtggaccccgtctggcgcttggcgctactgatcgagggcgagcctcccacgccggcggccgcttgacgacgatgacgtgggcggccgtagcttcgacggggacgacggcgatgacgacaacggcaacgggggcgatgacctgccgcttatgcaggcgggctgcagcgcgcgctggcggacgttgggatgattcgcgagctagcaagcggcgggctttgtcggctccgtgacctcgagcgaggccgccgctgacgagtaggcagccgggacccggcgggccggaggtgcggcgtctccacctcctcctcaaccgccttcctcccggtgctccacccctcgcgcgtgaatccggcggcggcgcggcggatctggcgctggcaacagtgggaagcatggtggcgggtgccgatcgggagcggctgagcgagcgggcgggcaggaagagcggctccgtcagctcactgagcatcggcgacatgggcgcggcaacatcaccgagggagaagagcgctagctcggggaagaagggcaaatgagtcctttttcatatgaactcacatgtttggatggcagatgtgatgggagtgctatgaatcgcaagaaaattggtgccctgtgcttttagtcgaagtgaaaaaatttttgtgctattttttggtaccaggtttttttatgtgctatggatcgaattttctcattttataactggccgttcctataacaattcataagtcccaatatagcaactgtgttcttctctcaccacagtaaacactggagcatgggtagagtcactcgcactggacagtagatatatttacttttaagagaagttttatgacactagagcagatactgatatgtaccatagtataataatatttggtttagtttaatgcctcgatcacaaaccaagagatgctaaattttatgatagagaaaacatttaggaataagttcaccagccatccctctttacgccgagtttttatgacatccctaattctcagtaccagaaatctctatccctaaactatataaaactgtacaatttcagtcccatggcagtatagatctttcgtttagctaacgtggcatcctaatcagcaaaataaaaaataaagaacaatatgaggcccacatgtaagtgagaagaaaaaaattgtggggctcgtatctcttttttcttctcttctctttagaatgtatgtgccggcaaccaccaccaatccatccgcagccgtcatctccccggcgagagtgctgccgatcacctgccctcccgccctagctagacacaccgagaacggcggtgttgcggcgatcccctccgtctgcggaccacagcaccgtctcggacagagacagcacctcgaaccgcccgtgcagctttaccgcagtcgccggcgaggtcgggagccagagcgtggtggcagcgacagtgctgcggcctcacagcacagagccacagacacaccgacgcgtcggtaccgcacgaatgcggccaccttgtagccggcaagctcccgcacgacagggctcatcgccgccttgctctcccgcgtcgcaaccaccagcggcttgggcttgttcttggaccctagaggccggccaggtgacggagaagatcgggcgcgggcaagggcaagggcaacggctcgaccagcttgcctcgcgacgacccctcgtcagccatggaagcagcaaaacacgatagatcggatcgctgcaaggttatatggagaaaattctttgagtatccctaaaagttcgcacaatcccttctatgcccctgatattttctcattcgtttgtatatccctaaatttcagtttggatcccttctataccccttccgctagttggtcgttaaattcctattataaagtcctttttaacctttggtataaaaatatataaatttatgaagtatattgatggactctataagtttgttgtatgtgactattatatttatgagtttattttgtgagatattatttaacaaaaataatttttatctcgcataaaaaataaattatcataaataatattttgcataacaaagtcataaataatatttattttagatatgacataaaaaaatgaatttatttactagttattaaaaattatttttagcacataaatagatttcttatatatataaattttaatggtaaagatatttttttgttatatctaaaaataaattttgtcatagatcaaaattatttttttttgccttcatggggacgagagtaaaatattgtttttgctaaacaatatctcacaaaataaactcataaatataatagtcgcataaaataaatttatagcctcattcaatatacttcataaatttatattttcttgatttcaaagtgcaaaatagatattgtgaaatgaatttaacggtcaactaacagccaattaacggaagggatatggaagagatccaaactaaaatttaggggtacagaaagaaataagcaaatctaagagggattggatgaaattacagggtacacagggaattttctctgtatggacttccaagcagtacgctaactccagatttcggctgctacaatggtatgtatagttaaaagggtgtagctatatttatggcgccatatttttcatcaaaaaatagtcggcatgtatttacattgtaagtccctaaattacatatgtaattttagtgtatttacaatgtaagtctcaaaattacatatgtaagtactaaaattatatatgtaaattcgaaaattacatactaattgcatatgtaagtggggtgtaaatgaggtgtaactactgtgtaagtggctgaaaaaaatcgactgtagcatatggcgccatatttctagcaactccgtagttaaaatagctttggttcttggctctactactaccagtagccggtgagcttaaaatagaggggagacgacgacgcaacgctgcatcaggcagctgcccggggccgatcatcacctgctgacaaatagcatgcactgcacacacacagtacctagagagatacagtacaggtagctgcaggccggccgatgatcaatacccgattaccgatggctcgccatcgacgacgttgagatagatatgatccgctaggcgctagctattggcaggaattcagctgcgcacagctagctgatggaacacaacacaccacatcatctatcatcatatatatgcgtcgctgtgcgcgccagcttccacggcggccagcagctgttctgcacatctgcgtggtggcggcggctgcattccgccggccgcctccccttcccctcacccccttccctcctcccgtcgcaagacgctcggggcggcgacggtggcggcggcagcagcagctgaaaacgatgccggcggcggccacgagagagccatcgacggggctgccggtgaacttatatgagcggtcttctttttttttctcacttacacgtaggccctattatttttttattttctattttgttgactacgatgtcacgtcggtgaaatcggagatcatgctaccatgggactaaaattacacggttttatatagttcatgggtgaagatttctggtattatagattaggaatgtgatatataaacccaacataaagttgagggaccgcgcgctgacaaacttattccaaacatttattacagccaaatggcactactgaggatctcaaaattgctctattttagtccccgctagctatatttatggtgatggccaattttttttaaaaaaatcatttttacattataaattacataatttgcactagttaattttaaaacttactcttcaattgtttataatacacgtaatataaaagaattaggataaaaacaatcaattacctacttggaagaagggatagtagaaatatataagagaataaatataacaatcacacagggagaaaagtgcctaaaaccaaataagaaaatagggaaaaatgcaaaaaccaccccacatgtcaccataagttcagaattcctggtataagaccattcattgcaaattaatacccacttttaatcctccttggtttgagattccccctaattgctgttatactccgccattttcatgccccttggtttgagattccccctaattgccgttactccgccattttcatggccataaaccacacatgcgctatatgaatactaataaacgaggagccatggtaaacactcatgtcggccatacccgttgacacaattgaggcatccctaatcacggcggccagcgagtcatgggtgacggtgacggtgatccagagttttcgctatgaacatcagagacaaagcctcagagtcaccgaacataagctattgcgtttgccttatagagtttggcagtagctggtttctttgatagattcaaaatgagaaagatgagctcaatgtgatcatttctcttttaaaagatgtgcttgggtccttattcatcaacagatacgctaagtcatgtcaaagtacatgtggaagtgaaaaaaagacacgtgaaagacggtaaacgttgagaaaaattaaacaaatgtgaattagctaggaagggtatttgcaactaattgtctcattgaaagaaatctaaacatacgggggtggtttttgcaatttttgcaagaaaatatggggtcatattttgtgcaaaaccgttcttaatggatgcaatataatcaagtggtgtttcaaagcatatgtatctcaaggactcaaaggtgtttggatactgccgaataaacattttgatcaattaagcacatatatatgagtaatggtcaatccatgcatgcatgctggatttacctgcaggtaaaacagtggtctcccaacgatgactctggtgtctccaacatcgcacaggaacccctcggcgccatggaacgtcggcatcagcggctcgccgaagtcctccaacgccacgtctgcctctgcctccacaaagaccaccccttcggcggtgcactccacggcgagcatgtggcccgtgggcagctcccgcaggcggccggcgatcgggtagtagtacacgagggcctccgctagggccgccttgatgccgtcccctggcctcgccggccgacgatcgccgtcgaccacgcggaagaactcgaggcttggctgcaggtagcgcaggtcccagtggtcgtcgaggtcggagagcggcttggtttcgcgaggcgtcgccctcgccggcgcaaccagctcggggtttccccggcgtgccgtgaacgaatcaagcttcatgattctacgtacgtttgtatggatggatcgatggatgataattatgtgtgcgacaacaatttgtgtacgtagacacgactggtgtgtgctataatgcagctggttttgtctctccgttcttgaacacaaatacgcatggaagggttgaatttatacacgcttgggaatgtatcgacattcgtgcgaagagcttcaggtggtttttttttctaatgaagatgaagttaaaggaatgcataacaaaaaaaccattagcacatgataaattgagttatagttattataaatttgaaaaattaatttatttgatattttaaaacgatttttgtatataaaattttcacgcaaaacacgtaaaatctatatcttacttagtaaaaatataaacaccatgagacagatgcaaatttttagttgcacacgccgtatcgacagaatgatctctctggtatggcaccgaagtacacgtactcagtactctcccaattggacgacaattaaacatcatatataaaatgtttttaaatgtgcaacacgtaatatatgtgtaccaccaaagaaaacgtcaggtcaatatttgttttacaaaataatggagtaatggaaaaaaacaaagcattatgctagtacgtagtagctagtgtgaactgtgttgacattgaatatgtctttttttttctctccatatatgcatataccgtttttagttgatgtcttttgtgttaacacatgtgtctcattgtgttgtacatctaaaataaattcacagttttttgtgtacatatttgagggcacattttcttgtggtggtacgtgtgatagcatactgcatatatatagtacgtaccttcactggtggagaaaccctttgtagtcccggttcgtaaccccctttagtcccggtttccaaaccgggagtaccaatccgggactaaagatcgctatctttagtcccgggtgaaataaccgggagtaaagatcgatctttagtcccggttggtgttacccctgttgagctgacctttttttttttgcatgccctgttgctgcatggtttatatatatatatatatatatatatatatatatatatatatatatatatatatatataaaccatgcatatatatgtttcaatacatatatatgcatacatatatatatatatgtatatatatatatattatattatattatatgtatatacatgcataatatatatgtatttatacatatatatgttatgcaaatgcatatgtatatagatatatatatgaacaaaatatatttacattatagaaaatgtgtacacatgcatatagaaacatatgtagtcatgtattaattacaatccattatatgtcctagctagctacgatttcgacgtagtagtactcgctgctagctcagaagctaaggaccggtgaattgtgtttccgtcgtagtagaattcacccttgggatcaaggatttcttcgttgatgaatcccatgagttgttcttgaaccgccgcgataaattccttgtgtgtggtcaggttatccctcatgcgaataaactatatgaatgtatgaaattgattagtaattaaacaagaaatcgctacgtaatgaaattttgaatttatttgtacgtacatcgagctctcttgtggtgatgatttggtctgcaaggcagtggcaatactcgcacacgtaatagccgcacaagttagttccctgcttttgctttgcgcactacaaataaatgacaaacaacgagagatctaattaatatacacttgtatgtatttgaatcggagaaatataaatgtagagcatgtgtactcacaggaaatttgaacttccgcctaagtctttctctccatttgccgcgaaccaaatgacggaaccgataccaagccctacatggagtttaaagctatgattcgtagtagcaattaacataacaagattttcttaattaacaaaggaacttatgacggtacctgtctataagttcgaaaaccttgtcaaacgtagactcttttttatccattgagtcatatacgttgacggtgcaggcctccaggtcgatgagtaaaagcacccagtggaatctgcaatgtgcgtgggatgcattacatatgaaacacttagcaagttcgtacgggaatgaaatttggtatgtaggaagacagtaaaattaaactaactctgtgttgtatggcaacagtatgaacgtcttgtaatgctgcgccttcaggagatggacgagattgtcctctgtttcttgtggatattggtcgagcattgcgacgtttactttccgagggtcgatgaatccagtatcgaaaaccctccgccgtcgggccctttgaatctccattctacaacgataaaagggagtatattattttctatggtctacttatatacaaggacctaattaattaaaggagacgtatagtaagaaatctaactgaacgatatacttacaaaatccagcaactcataatagagacgtcgagggcgtccagctggtatagttcgtagattcccctgaaattgatccagagaatgtcatttccttgcaagaagtccgtgtccctgatcctcgctccgatcatctctctaccggtggcgctcatctccatgtacagctgatggaacttgtacatttgtgtgggtagggactgcagcagctcaggcttgacaagcggtttaccgagttcatacatgtatttcacttccgccttttcgattggtgcgactcctagcaattgatccgtagttagaccggtgtcagtaataaattgttctatcgtcatttctttaccggtcaccaacggctcgatctcctggtttggttgctctccaagctgagggactggtttggactttccagaagatgctttcttcagcgttcgctcatagtccgatagcttgatggcctccttgacagatgcagacatacccctgaagaagttcctgacactgggtctataggaatcttcttttctggacttcgaggcttgaattgtctcttgacttctgatgcaacgtaagcgtcaagctcctcttgcgtgcaatcgtaccccgggtccttgttcttggcggcgtcaactttcgccttctttgttgcccttgtgtgggcaagcggtggagctgggggggcccttgactttgaaggtgccggaagaggagcttgctggggagtaggtgtaggagcacgaggaggagtcggtgcaggatcctgaggaggagtcgatgctggagcctgcggtggagacggtgctggcggagcatgaggaggagacggtgcaggatcctgaggaggaaatggcggagccggaggagatggtgcacgagacgccgcttgtcgcccagggaggatgatgtaccgcctgcgccatagaataatggcatggcatgtgtctcgtagatgcgtctcaccgtctcctccagggtaatccagctcgaggtcctcgtacgagccttcgaccaactcaacttcgaccttggagtatcctgctggaatcggcctgcagtggtaagtacctgaagggtccgttggggtggccatgcccgacgccaccttcatgttgtgagagattatttattagtaatcaacatatataagcagcaactagcggaatggctaaatcttacctttattgataagttcttgaaaggaatatgcagctcacatggtgtccgctgagtgatgtcatcaacgggacaggtcgattcgtcctgtgtttgcatggcgtccatgctctgtgatcctacctgccccgttgaggcgcagctgctacggtttcctgacgggctcaccattgcaggaggaatggtcggctggggatcatgggaccgatgtgcggccatgcgttcatcaaccttccttgccacctcctcttgcatgttgagttcgtagctcgatacccggaactctaggtctgcaatcttcgcctcggtatctctcttgctcctcatccgactcctgtacgtgtggatgtcctccttgaaaccaatcttccaaggaatcacccctttccctcaagttcgtcctggatgctctggagtctgcagggcgagtgtcagctcgtccctatctctgtctggtcggaacgtgccctgagaggaggcttccactgcatctgttagtcgtcgcgcagcctctcgtatttgatagccgaagaccagtgagccatcagctgggttgagcgttccaccgtgagcatagtaccagaacttcgatcgttccggccaattggctgttgccggttcgatacccctctcaatcaagctagcctccatctgctcccacttcggcatcgcgacgctatagcctcctgaccccaagtggtgatggtacttcttcttggcggcattttctttgtttctttccatcatcgcctgcccttgttcacctgtcttatatgcaacgaactcgtcccagtgatcccttagctttgggaatgtgtcgaagttcggtgtctgccccttcagtatatacttctggtacagatctcccttgaagctctgaaactgttctgccattttcttcagagtccaccttttcactttgtcctctgtacccgcaggaagggtgaatgtctcgagcattgtggtccacagcatctctttctccgaatctgggacaaagctctcatgatctccgcgtgcccttgttcttcgccagtacaccgtactgacaggcacgttatcccgcacaacccaaccgctgtgacgtacatagttcttggcggcttcggccggggcactaggacgtccatcttcttccacttccgttatgatgtgccgaccctcaagcttcttcgctgcacctcgttgcccgcgtgccctcttctgtccaacggagggttgactaccactagcctcctcctcctgattcccctccacatccctttccacgtgcccctgctggttcccctccgcatccctctccacgttcccttcctcgttcaagtactggtttggatcctcgttcccctcttcttcattccagtactggctgcttccctccgcgattgtatcgtacaatatctgttcctcatcgcggtcagccatctgttgatacaagaaacatctgctaagtcacgagacatttatgttttaacaatctaagtcatgtatgctaagtgtaaatgtcgtacattagaaccctacacaaccttacgtgctaagtctaattacaaatcgtgatataagctaagtctaggtgacgtatattatacaaccctagctagtaaataattatatactaaatctaattacaaataaaataatcttatattaaaactcaaataatattacatgctaagactaaaatagtcacgtatatgctaagtgtttcgtgcgtatatgctaagtctaattaagactacaatagtcaattgctacttgtcgcaccaattccgtagtcaataattacgtaccaagtctaattacaaataaagtaatattatattaaaactcaaataatattacatgctaagactaaaatagtaatgtatgctaagtgtttcgtgcgtatatgctaagtctaattaagactacaatagtcaattgctaggagtcgcaccaattccgtagtcaataatgtcatactaggtctaatttgcaataaaataatcttatattaaaactcaaataatattagaacactacacaatcttatatgataagtctaattacaggtctaataatcttaattaattgcattacaaatataataatcatttatattattacgtcacttgcctgctccaattccttctagggctacctcttccactcaggcttgacggacgactccgacaacacgtcttttctgcaagatacaaaaaaatgtattaggataaatgcgaagtaacatatatatatatatatatatacatatatatatatatatacatatatatatatatatacatatatatacatatatatatatatatatatatacatatatatatattgcatttcacgttaacgttcgtcctcgttcgttccctcgttctcgcttgtcttcgttcgatcgttctcgttctcgctctcgtttgttcgatcgttctcgttctcgttcacgttgtcgcggcaacgtacgttgacgtgttcgttctcgctctcgttcgttcgatcgttctcgttctcgttcgttaacggcggtgtggcggcatcggggcggcggttggcgcggcggcgtggcgacggcggcggcggcgtggcgttgtggggccgtggtggcggcggcgtggcgtggcggcggtggcgtggcgtggcgtggcggcggcggcgtggcgtggcggtggtggcattgcgcgcgcggcggcgaaggcggcggcggcgtggcgacggcggcggcggcgtggcgttggcatgcggcggcggcgttgcgcggcgtcgaaggcggcggtgtggagcgtcatcgtcgtggcgcggcgtctcgtggcgggcggcgcgacggagagagatcgagatcggagagatcgagatgcatgaagggagatctggcggcggcggctctcaccccagagatgcggcggcagcggaggaggcggaggcggcggcgaggacgacgagctcgagacgacggcgagatacggcggcgtcggcgcggggatttgccctaggcagtggcggcgaaggagagaggccgagagagatcgatcggccgaaaacgtttaagtgttggtgaagaagacgagggcgcaccgggaatatatatacccctggatctttactcccggttgttctcaacaaccgggactaatctttagtcccggttgttgagaacaaccgggagtaaagaaaagatctttactcccggttgttgagaacaaccgggagtaaagaaaagatattaacttccggttgttctcaacaaccgggactaaagatatctttagtcccggttgttctcaacaaccggaagtaaatatcttttcccgctatttcgaaattctttttaaacccggttagggttaagaaccgggactaaagattatagcactgcatatgattttcgcttacatatgtgtttataaaatagaagttaatgcattaacattatttaaagtacaaagattaaggacaattacttcgaaaaattatttttggctgtaataaattaagtggataaatcgtaataagcaaatataattaataaaaattccaataatcatatatacttagcatatatatgaatgatattattatattggtaaaaactctaattaagatatgtatgtacatactgcatgatttaaaattaataaaaattgtaatcatcatatgtacttagcgtaggaattatattaaattaaatgctaaaaactctaattaacatatgtaaatgccacatgcatgattttaaccttttaaaaattcgaatagtcatatataagtagcatatgaaagatagtaaattaaattgtgaaaaactctaatatatgaatgatagttttaaaaatatattaaatttaatacttttaaaaattctccagtcaattataattagcatatgaatgatagtaaattaaatgttaaaaactctaattaacatatgaaattgccacttgcgtgatttaaaacttttaaaaatcctctagtcaattataattagcatatgaatgctagtaaattaaatgttaaaaactctaattaacatacatatgaaattgccacctgtgtgatttaaaacttttaaaaattgtaagtatcacatataactagcatatacatgatttaaacttgttgaaacctctaataatcgtgcgtaattaacatatgccatacatcaattgatttatatggataatcaatacatccaaaatagtttacatcgtgtacacaataattacggcacgtactttctcctcactattgttctcttcttgtgatcgctgcgtgagtaaggggtgtcttcatttgataggaggatgctagggtcaatcgtcaccgtgaaagggggttgcccatccaactgatcgtaatcctcgtcagtcttgtcctcaactccgacgatttttcttttgcctgggagaaccacttgacgcttaggctcatcaggccctctgcccttctttcctttgctagacatgtccttcacgaaaaagacttgcgttacatcattggcaaggacaaaaggttcgtccgagtatccaaccttgttaaggtcaacagttgtcatcccactgtcatcaatcattacgcctccaccagtcaacctaacccattggcaccggaacagaggaaccttgagaggaccatagtcaagttcccatatgtcctcgatggcaccgtaatacgtggcagttgttccatcgtgtcccatggcatcgacacgaacagcgctgttttggttcgtgctcttcatgtcttgggctctcgtgtagaatgtgtacccattgatctcatatccctggaatgtcgcgatcgacccagacggtcccctcgccaggaaggcaagttgttggttgatcgactcgttacccatgagatgttgtcgtagccacgcggggaaagtatcaatgtgatgccgtgtaatccatgcatcggacttatcaatgttcctggcgcgaactagagccaagtgctcctcgatgtaaggagctaccaatgaagagtgttgcagaacagtgaaatgggctttacggaataaattgttgtctaccgtcgttattgctttccttccgagagttccctttccccatagtctcccttcatggcgtgattcaggtaccccgattgggcgaaggtcttcgataaattctacgcaaaattcgatgacctcctctgttccataacccttggcgatgcttgcctctggacgagcacggttacgaacatacttcttcagaacgcccatgtacctctcgaaaagaaacatgttgtgtaggtacataggcccaagaatacggatctctttcacaaggtgacaaagcagatgcgtcattatattgaaaaatgaaggtggaaatatcaactcaaaactgacgagacattgcaccacttcattctgaagggcttctaatctatccggatcgatgaccttctgcgaaattgcgttcatgaatgcacatagctttgttattgttgcccggacattgtctggaaggataccccttattacaactggtagcagttgtgtcatcaacacgtgacagtcatgagactttaggtttgtgaacttcttctccttcgtgcttattattcgcttgatattcgtggagtatccagacggtacctttatgctctccaagcattcaaacatactttccttctctgccttgctaagagtgtagctggctggactcaagtaatggcttcctttctcctttggttccgggtgaaggtcgccgcgttgttccatatgcttcagatcattacgtgcttccagtgtatctttcgactttccgtatacacctaggaagccaagaaggtttacgcaaaggttcttagtgaggtgcatcacgtcgattgcgtggcgtacgtccaagaattcccaatatggtaactcccaaaatatagagttctttttccacatcgccgcgtgaccatcttcgctctctatatgctggcttccaggcccctttccgaacactactttaagatctttaaccatagcaaacactgttttcccgctgcgatgtttaggcttcgtacggtggtcggccttatgttcgaagtgcttgcctttcttccgtaccgggtggtttgctgcaaggaatcgacgatgacccatgtatacaaccttcctacagtgcttaagatacatactttctgtttcatccatacagtgagtgcaagccttgtaccccttgttggactgtccggataggttgctaaatgcaggccaatcgttgatggttacgaacagcagcgctcgtaggttaaactcctcctgtttgtcctcgtcccacacggggacaccttccttcttccacaactgtttaagatcttcgaccagtggtcttaggtacacgtcgatgtcgttaccaggttgcttggggccttgaataataatcggcatcattatgtacttcctcttcatgcatagccagggggggaggttgtagatacacatcgtaacgggccaagtgctatggccgctgctcatctctccaaaaggattcatgccatccgtactcaaaccaaaccgtatgtttcgtgcgtcctttccaaattctttaaattttctgtcgatgtttcgccactgcgaaccatcggcggggtgtctcagcatcccgtcctgttgacgctcttcagcgtgccatcgcaacattctagcattccccttgttcctgaacaaacgccttagccgtggtattatagggaaataccacatcaccttagcaggaattctcttctttgttagctgcccgtcaacttctcctggatcgtcccgtctaatcttgtatcgtagtgctttgcaaacagggcatgcttctaggttctcatactcctcaccgcgatataggatacaatcgttcggacatgcgtgaatcttatgaacttccagtcctaacgggcagactatcttcttagcctcgtacgttgtctcgggcaatttgtttccccccggaagaatgttcttaacgagtttcaataaatcgccaaatgccttgtcactaaccccattttttgccttccattgcaacaactccagagtggtatccaactttttgtgcccctgctcgcaacctgggtacaacgaagttctgtggtcctccaacatcttgtccaatttatgggcctccttttcactttcgcagtcctccctggcgtcctgcaacatctgaccaagatcatccgcaacgtcgttaccatcagcagctatttcctcctcgcccgtttgatttccttcaaatccaacatactgagcaaagtccggaatattgtcgtcttccacttcatcttcttccatttcaacaccttgctctccgtgggatgtccaacaattatagcttggcatgaaccccgactcaaacaagtggaaatgaatagtcctggatgcagaatactccttctgattcttacacttattgcatggacaacaaataaaacccctttgcctgttagcttcggccactctcaaaaaatagtgcacgccgtcaataaactctttggaccgccggtcagcgtacatccattgccgatccatctacatgagtcaaaaaaaccgcacacaaataattattcttacaataatgacagtcatacaataactataagatatctttattcatacaaaaatcataaaatattacaccaaataattcttaaaaactatttgtataaagttttaaactaattttaatgtgttttacttcttttaattttcattttagtttgttttctattatttaagattaactttcactagagttttccttctcaactattttataaaaccttgtttagcaaatgaactaaatttctatatattctttcttccccacacacattttctctctcatcaacttacaactaaattttggagacaaaaaaaagtgtgcaaaacataggtgcaaatgtagtatgacaaaaaaaacattggaggatgaagttgcaaaccttttaggcacctccgatttgtatgtaatcaccaaaataaattcaatagaaattttggcatgacctcccctcttttttgaagtaattttgaagcttgctcggacagctggaggaggaagaagacatatatataggggtgggactttagacccggttggtagcaccaaccggggctaaagatcaccgggatcattagtcccggttggtattaccaaccgggactaaagatcatctttagccccggtttttattgcatccgggactattgtggaaatcggccgaccgacgaaagatggtttctccaccagtgcttgtgatgtttcctacacgctgtaatagaaaccactaatcttaccgtgggccgcatctcacaccgttgacatctgggagaagttaataaaccattacgagggatgtttcctgagataaatattaaatatgggcatgtgataacatacatattaacttatgtatagcagagtatatatgtagaatatattccatgttatgcatggcgcaagatccaaaaagaaaaggaaatgtccttttctattttaccatagaaaaccatgtgatgtgactaggctaaacgtgtttcttgcctggaatgggaggtgtagtcaatggaaggatctacagatccggcgactgcttaaaaaaaaaatcagacgatcaaatatttcagttgactaactagtgaaatattaagttatatatggtgaagaaaaagttagtaatgggaacatttaaattttttgtgaaacatcatgagaacatgcattgaaacatattaccatcacatatgaaacaattagtttaacgttttgaaacatatgtttttttatcataatataataatgcgatattttttttaaagattttattgtaacgaatacaatgatatgatcagatagtagattggataaattgtttaggagaaaaattatttgaaagctttctaaatacattcatgcatggaggagagagagaggcatgagagagaacaagggaagatagttgcgtgaatcttgggaaacacggtggtgtggctatcacgtatgaaacaataagttttaacatattgaaacatgcatttttttcattggaatataattatgtgatatcttgctgcgaagatttaattgcgacgaatacattgctataattggatcgtagatcagataagtagtttagaagaacaattatttaaaataaagagatgggagagagacgaagctaagctatatagtactttatccggtagtggtgtacatgtgggggtgagggcgtatgatttctcagcatatatgtatatataggacgcccgatccgaatcaatctacgtggtattttttatttttagtgtctcgctgttctttttttcaaggcaattgggggccgaagcatgttgattaacaagcattaatagctaggaactagctagatatctttcgatagattttagagtacacatcacaaggatttttcaatccttattagattaggatccaacacacacatttgactagacaaactcgacatgggctgaaaaagtttcataacggagtcgtagtaagaaatatatatcacattatattacagttaaaatagttatatagtagttacactatactatagtttctatagttacagtactgtatttccatgatagttatagtgcagttacaaatagtagttacaaccctgctatacgtacgactcctccgtccgaccagtgtgtacgactggaacggctgagcacgtcgctacgcgcagcttctgcctgaatttcgtcaagctaaatccaaagcttgctgtcttaatattctgtttttcgcgcatatacacacacaaaaaaaagtacagtgacatcaaaaaccataaagcacgaagtatactgtactgtccaatcattgcataaaaataaacatgctaatgtcttgtttaatctgtcgattgaaattagacttagcatttcgaagcgaagggccaacaagtttgtaggttctgcacgcctacagcccacgaagatcgacgttccgcacgttaacgttgctgcgtactccgtagtcggacaaaagtcggacgatccagtcgtgtgtgtagcattttcgtagtagttatatctgtaactatattatcaatagaatattttgccaaccaaatcatagcagcctggttgctgagttgctgaactgccttgtttaggtgattggaggtcattggttcgattcccttgctgtgcacgcacttgttttttcaaaaaaaaaaaaatgtcagctcacactagcacgaatcttgacgcaatcgtaaggtccagaaatgatggatctgtaaaaaaaatatggcgacataagggatggatcgaggagaggaggggtaacataaatatggcgacataagggatggatcaagcaggggtaacttacaggcaactcttactactacaaaacatcaaataggtgtcggtagtgctaaaaccggcacctatagacctttttctacatccgcgggttaaaatcgcaaaaaaccggcacctttaagtaattataggtgtcggttctaaataaaaaccgactcctattctattttgtgtcgtttttttttaaaaaaatcgagcctttaatattaaaaaccggcacctataataagtttgtgtgggattttttttaaacacggaacctttaatattgaaaactggcacctataataagttacaggtgccgattttttaaaaatactggcacctacgaattgagccgggccaggatgagctgagccggcgggccccaacacggcgcgtcgaggacgaggagataaggtcaactagtcgttctctccgctctcacagtcgaactctcttgatctctcccctctctctcgagcacccactctctcccctctctctcaaacaccctctctctcttggcggcgtgcagcaaaagctggaggagcggtgtgcagcgactcctctctcgtgcgtgcgtgtgccggcggccgcgaccctccgctccgccagatccggggaggggcggcccaacggcgtcatcggtgggaggcagcatgcgacggcggaggggagggggatatggtggcggcctggcggctgcgcactcccctctcgactctctcgctgccccagccggcggctggccggcggaggcggcagcggcggctacgccctcgcctccgccagatctagggaggggcggcccagcggcggcaacggcgggaggcggcatgcggtggcgccctccctcctctctttctgtgatgatttgtttatgatttctttgatgttcttcaatgttagtgaatgatttctgtgaaagatttctgtggtgttgttcaaggtttcttgttgtgatgttgtttgattggggattgcggattgggtattgtgatgcagggtggatgagctcgatgcatcggctcggtttgagcctattcatcgagccttttttttttttggctcgcgagtggtatcaaaggtgtcggtttttaaaatgggattggtgcctgatcactcttcagtgccgcctccatagtgctggttgggaaaaccgataccttaaggggtttcccaaccggcactatggaagtgttatgtggtattgtgtgatgcgagtcatcttctctgctgatggcgcatggtgtgtgctacggttggattggtaatgggcagctaagggtggcacctcctcgactgctgcatgcccggctcaagaagacgtgatttgttagtaatcgagaaaagcattgatcaacgcaaagtaattgatttaggactaatgcgcttattgagttgtaggaggatggtcccgatgacgaaacgattttcatgttggtaaacctccaagtaaagaaagaaaaacggtgtgaaggtattcttattggtatagctttacatttaagtttggatgccgtactactaagagggatatcacgtgtatataattggtcgaatatagtgctcaaaattttcatctttgtgtgagttgaaaaatctaagccaatattctaactttgggttgtttcacatgtcataacacttacaccaggtttctttgcaagtttttcaacatatcatgaaggttttggaccatatttatgctgggtttgatagcccacaaaactagctttccatagagtccaagatcttcggaatcagagttcggagtaaaaatgtcttgccattttacttgagcaacattagactattcgattttaaatcagactatccgatctatcagactccgatttttcacagaacttcactctctgtcttgatttgaaaaatcctttcgagtgagttttccccctgtgtaaatcagagtatccgattttggatcagatagtccgatgacgcagagactccaaaatttcaaggaacttgagtctctatttgaggacaaagtttttgcttctaaatagtccaatttcacattagatggtccgatttcacatagacactctgatttcacattacatagtccgatgtgtcagaaagtgtaaaatttcatgcaacttcgttctctatttctcattgctttggaggtttaaaatatcagactatatctgatcttgtactatttagtgtatctatatgaaccctccaccaacccttttctagggttagccctttcattccaatatttgtggcttgtggcttggagctttgtgctaagtgctttagttcttttagcgcgctcctctctctctctcaaatccccttgttctttgtgagcgtggatttggagtttaggagtctagtgtgtgtttctcttgaacttgagcactaggatttgtacaagagttgtgtggtgtttattactcttggaggttgagtgttggcggatgttaaatgccaatcttacgctgccaatacttgcataaatctgaaaatataaaacatccaacatagtggtaggatttaattctaacaaattccagaagtgttcgtgtatatttggatgcaggtgaaaaattaccaaagttaagacgaaatatacataatagaggaggataatttcatccacagaagtcttgggcccacaaactcgttgaaatacccgaaattaggccccaccgacacactactgggcaaaggactcagttgccaagacccatgaggaactaggaagcctagggccaggggagccggccaggggtcggccgacccctaggattggccaacctaggcatggccctgcccaaccacaaccgccttctgacggttactactgactttcttatgccggttgcggccagtattggcgctaccaaccgtcatacactagctatataacggcctcatctccttcacttcaagacacaccaaggttgagctaaattacaagaggctctattgtatctttattgtatacttaaaataagatatcatatttcaaccatataatcaaagtgtgggataacatatttcatctacgatctcatacaaagtctacaaaatttatttctctttcactactacacgattgattttcttggacgccccccctttttgtttccatgcggtccgtcagtggaaccgcatggaaaaataggggaccggcgctggggtgtcgcccacacgggaaaattgattttcccatgcgggcgtcctaacccaaccgcacggtatattcctgcctcctttccctcccacccacttcaaatttttcctatctctctcctcctttttcccttttattctccctcaaccactcccacctaaccggctcccacatatctctctctaccttatctcttctcaaccggctcccacctctctctctctaccttatctcttctaaccggtcgggcttcccctcctcctcccccggcggctgggcaaggcggtggccgggcacggcggtggcctagggctcctcgacgctcccgacccgctcgtcaccaactacgttctcctccaagccgtggccaccaccaacatcagacgccccaccggctcggtggcgtctttcctgtccggcatggccacggtcggtgccaagctggtcacggtggtcgaggaggaaggcaaagcggaggaggacgatgtcgcggcggcgagcagcgaggcggtggcgcccgagcgatttttcctttttttatttttggttttttttggttatgtgcgggcggtataacacaaccgcacgggataatcgattatcctgtgcggtcggcctacccgcacgcgaaaatactgattttcgctgatagccggttacaggcgggccggacaaccgcacggaaaaatcaaaatgcccgtatggaaaaaatcttgtctgcagtagtgtttaaacatagtttgacaaaccagtttattttttgttaataattaatataaattttacttttagctcaattattaaggaaatataaaaagttattacttagtaatttccgcagcaaagcatgggaaatcacctagttttaagaatatccggtagcaatgcacagggtatcctctagtttatacatatattgaatgtgcaatgtgttgtaaagtatttttcaattagttgggtttatttttgttgatcttgtagcttcctactattgattttactaattagctattatttttcatattttttcttagctaatgcaaattaatccagtacaagatgcaataggaaattaaaaatgttacagccagtaatcagctgtttttttaaaaccacattaaaaaacgctcatataaaagtgcgtgcttgtaggtacactcacactggcaccaccgttgtcatctttgctgttgacactgtaaaactaattaacagtaaatatgatcatttctgttaattaagtaacttgaacgggatagaatggttcccatctacgaacctaactagctgatctatatataaccacgttttctttcctcatgttcgatcgatctctttgacagaaacagcaaattattccctccatattttaatgtatgacgccgttgactttttaatcaatgtttgaccactcgtcttattcaaaatttttatacaaatataaaaatacttatgtcatgcttaaagaacatttgatgataaatcaagtcacaataaaataaattataattacataaattttttgaataagacgaaagatcaatgtttattaaaaagttaacggcgtcatacatttaaaatacagagggagtaatagatacacaagaaattaaatctctccttttgctccacgtatattgttttattttgtacgagtacgccaccaagtgatgaggccattcaaattatttcggtggtgccgcgatgcccgatggccctggagggtgaaggggccatgcatatatatgcttttcccattttcgccgggcgtcgtcgtgaccccaacaattagcagctagcggccaacacatcgacgtacgttgttgacgatcgatcgatttgtccgtaacggtgcccccgcgcaacacgcctcaccgcgcacgcaggccgccacaccacacacgttgctagggatggatggatggatgagccccgtgcatcacgcctgcccggcctcatatggacgtatgcgcgatgtatatactccttttttttttaaatatttgaccgctcgtcttatttaaaaaaaaattaagtatttattaattctttctatatcatttgattcattgttaaatatgcttttatgtttttaataagacgaacaatcaaacatgtttaaaaaaatcaacggcgttaaatatttaatggcggatggagtatgtatatacggtgcaaaaaccgtcacagagtatattacgactcgtcgtcgatcgctagatatacattggtacgtacatatcccagtcatgccggtggaccacgaggtacattggcggctccaaggggtagtccaggtggtccctggaccaccctggatttcagccgagcaaacctccccatcgcccaaaactcagctcagcaggcaacagccatcgaacaagcgcgccgcttcattgaagctcacacgtcccgtgtaatcgcaccctcgcatgcccgtgcggtcttttctgctctttctcattgttgcccagagcacaaacaattcgctgcaatcgtatctgtcacggccgcgtgcaagacccaacgccatcgacgattgagtgaatcggccatctagattggaccggggattggattgattactcctcagcctaatcacaagctaagctgctctctttcctgggtgaatggttccttgattctctacttgttgctctccatttatctgaatgccaacctatccattatttgtttgttgctcgtttaatggagcagcaacaaggaggaagagagaacgagaaggggagaaggaagaagaaaattaatgacagcttggacgattacttatttattctcattttctgattagactcagcccaacgaatcctaattttcataaaagggcaaattgaaaacctttaaggttaaggggtgtttttaccctaatttagacaaaggccaaattttacatatacaccgtctgtattataaaaatttggagggtaaagaaggcacacccgacgaaaaaatcctggagccgccactgacgaggtatatggtctgtatgagacgtcataaactaacaataaaatgctaagaatggtacatatccatcacttttctcctgtgtgcatagcatagggaactcgtagttggctcgcatgccgcgccacaagtagtcgcgcacacgatctgttgggagttttgctctattactcatgggctttttttttctagtattagcgttctatctaaagttcgattatattaattggcccttcatccttaattaaataattaatcaaactgtgccctgttaaaagttctcttcgtttttttcaacatagtgatttattattaaacatgagtaatatagacaatttatcccattttaaatttgaaaactcttaagtatatgttctactaaatattttaaaacatcactcaaaatttttgaactttcaacttaaacctgaaaacgtccaacatagattttgaaactttccactcatgatgcgaagcatgcaactcagagtttggaactttttaatctttcaactcagaacttgaaagtttctaaaacttgcaacttaaatttaagaattctaaacacggaattaaaaactttcaacttgaattttaaaactttcaatttaaattttaaaacatttaactcagtatttaaaactttcaacctaaaatttaaatctttcgactcaaaatttaaaacttttgattcaatatttaaatcaaaattctttcaatttcaactaaaaaatttagaaatttctaagcgtacttcctacatccatgcactggtggagaaaccatctttcgtcggtcgatcaaattccacaatagtcccggttgcaataaaaaccgggagtaaagatcatttttagtcccggttaaaaaattttgatctttagtcccggttggtgtatcatttttagtcccggttcgaagaagttggtaggtagagtcaggatccaataatctttagtcccagttggtataaataaccgggactaaatatctatttttagtcccggttgtttataccaaccgggaccaaaataaactgccgagcgcgtgccccgaacatatctcctcggtgtcccctccccttttttctctcctcattaagtttcggtatccgcctccccccccttcctctccccttcctcccccttcccctccccacctcctcctccttcccctctctgctgcggccgggcagcggcgacggagcgagctgtccgtgaggcaggcagccatgcgtcggatgggtgactgcggccgtgcggcagcggcggagcgaggcggtcgcacggcaggcggccgtgcggcggatgggtggcggcggctgtgcggcggcgaccggtggggccgttgccgtgcggcggcggctgagcgaggcggccgcgcagcaggcagtcatgcggcggcggccagtggagccacgcccggcggcggcgggcaagcggccgacggcagcggcaccccgcattgttttttttatttacttgtgattcactgagatgtacttttgtatagaaaattttgtgattcattgcacatttgtatggatctatgatgtatttgatttgtttgtaatttttataggatttgtgatgtatttgatttgtgtgtaagtaactttaagatttgtgatgtagatttaggatgttactttgatttggagatctgggatatgtatctcactcgattcgggagaaaataaaaaagaaaaaaaaacataaggggaccatctcgctgccgctaccctctcttttagttccgattggtaacaccaactgggactaaagatcccctctctttagtcccgggtatttcaaccgggactaaagatagtgatctttagttccggattggtagtcccggtttgaaaactgggactaaggagggctacgaacccggactaaaaatcacttctccaccagtattgtcaaatgggtaaaacgttcgtattcgcatcatcaaatttttatcccaatatatgatgcatggttgacttatttcagaaaacacaaaccaaatcataactaaaagcaaaaaaggaaaaaaaatgcacgctggtccttgcatatggatcaaccaatggcccacgagacgtgggcagaaactgcattatatgtggagatcttggatgcataggccgcgctaacacgcaaatcagactgcgtgcatgtgggcttacagagtacgtacgttatgggccgaaaagcgcatgtaactttagtttttctggcgcgtttgcacgaaatacgaatttcggttaattaggtcgtcttgtgcgttggcaatgctgagctgctctgctgcggtgctgcgtcctaccgtgtgtatcgttgttggttgtacttacccagctgacattgtttaataataatggagatttcattaagtaaacggaagctatcagcttgtgcactgaaatatgacacaccactgtgttatatactcatatatgcaacaccgctatgtcagcatgccgataaaagcatcaaacacaaggaaagaggatatgttaaacatgctattcaccaaagcaaaatgtacgtacattttttgccaggaagaagttatgttaagagagacatgagagttgcgaggtacttagaagtattgagaggtggagtaatatgagctgttgattaagagagggactaggtatggaaaaaaaattatcgtaatcgatggcagtagagtaattattaagtaaactagaaagatagcccacgcacatgcgcgggcaccttatataatgtaagtgaaatttgtgggggtgaatttttattgaaatgtttagtgtatatatactaaacaaaaaataaacttatttagtatgctttgaatgctgattattttcttataattacccttgcaacatataaattctaaagtaaaattacttgacatcgtgcagttttgaatttataaaaaaatattgtgttgaaagaatggaggtggttcctatgagaaaatttatgatattttgacttcccagaaggatagcttataacccaaaaataaatccaatgatatcaatttttatttgattcaaatttaattatatttaaagttaaaagggtttctaggggtaccctccgatctacaaatgcaaccgattaaaacgaaaaaaaaaggatgaaatggaggagtatacctttatcttcgatttccaaaaaaaacctgtgaaaaagacttcaaattgagtggatttgatgagtagagatgaggggggggggagagagagagagggaagaagggcttctctgcgtgctcgggctcctaagttggcgaaaatgagtgggggaggagaaaggaggtggggcccgcacgggttaagggcgcggcccacccagggggagtgcggcagccatgctagcaccgtggtgtgtgggacggaggcgccagcgtggcgcctccctttgccatgtcagcccactcacgtgtgccctagtgccacggtgacacggtgacggcgccagggtggctggcgctagggtggaggatggtgccagcctctctggcgcaaaaaaaaataggcccattcctataataagtttttcgaggagtctatttgtaaaataagtttttaaaaggatgaaaaggtaagaaatttcagtttgtaggatgtttaagtgatagagggagaactgctagaccaagtagtaggtggaggtctatttgtgggcttttttttcatggcaaaatttgccctgggacacctagaaattgtgtaattggctgggggacacccgaaaggcgtgaatttgcctgaggacactttaaaagtgtggtaatttgccacaggacactgggcacattaaaatataatatccactgaattgatgagagagaaaccgcgtaaaatgacagttttgccccttctcttcttccccttccgctcggcgcttccatcgacggcacgcccgccgccgccaccagcgcaagcaccaacaccacccacggctccatcctgtgttgcatgtgatctgaaatcgttctccgcgcgcataaataaagctagccaaaacactgtctgatgatctccaaatctccaccatgtagctggttacaggaacagcaagcacactgccaacagcttagctccgtggcatacctgtgctccgcccgtgctgtgcctgcgcctcgccgccacgcgtgtgccacaccgccatgcctgcactgcaccctcgtgcgagcaccacgccaccgcgctgcacagcgcctgcgctgcccttcaccacgccgactgcgcagctagggttgggatgggaaatttttcacgagagagagagatggggaggaagggaaggggctcctccacaatctccggtcaagcagagcacaagcgtgctagctctcccggtggcttgcctcgccggcggcggagacggcgacggtgcggcgcaggatggagccgcgggtggtgttggtgcttgcgctggtggcggtggcggcggcgggcgtgccgtcaatggaagcgccaagcggaaggggaagaagagaaggggcaaaactgttattttacgcggtttctctctcatcaattcagtggatattatattttaatgcgcccagtgtcctgtggcaaattaccacacttttagagtgtcctcaggcaaattcacgtttttcgggtgtcccctagctaattacataacttttgagtgtcctgtagcaaattttgtcttttttcatgtaaaaataattttgattatcattttatcatgaagatagataaaactgaaagaaacaggagggaagtatgcatgttcgttcctatgtgatggcgaggttctggatgtgtgtgttcttttaaaaaaacgatttaaccatccaaaacaatggattcaccgatttaaatgaaaatcgttgtttagattttttttatttattagagtgttccttggtgacctaggagcgtttgtagggtgtcactttgtggcttaggaacaatttaaggatgtttaatggattagtttgttttccagaatctctaagattttataagcatttataaaatgtttaatggattttaatgccgcacggggtggaagggagggagagaggtttgcgatttttttattaaaaaatctaataatctaaaacaatgtatccatcaatttaaatagaaatcgatagctggttgctttgttttttataaatattttttagtacgttttctaattttatagaccacgtagcgacttagaattattgcgttcatatgtagatcgagggagagagggagagcttctagacttagctagttggtagaagtctatttgtgggatttttttgcctgtaaaaatgtttttattttagtttctcgtgaagagagaaaataatatactaaggaacgggagggaagtacgtaccgtacatacgttcattaattcgtataacatgccaaaacttttaatttttgtttttttacgtttgtgccgaatctgtttctttaataaaatagatctaatgttctaaaacaatgggtccaacaaaatcgttggtaggatttctctgatttattatttattatagtgccgcttggcgactcgagagtgtttatagggtgccacttagtggcatgagaacattttaggaaatttaatagcgcattcgcgcgggtatgcatctaggatgtgtttgaaaaatttataagggtggaatatcaattgagcaacattcaccaagctttagcagtatgttttctccataaattttcttcatcaatattgtttagataatttttctaagctctacttaagatttatattatataatattcaattcatccatataaacaattgtctataatcttcctcatcataaaaaaaaggatgtatacattttttagggtaaaaaaagaggtatacttagtttgtttggagcatatgtctaataaattaagtgtaaattaaaataaggtgtttttaccttttctataaaaagactaaaaaacttttatgaataaataaatgtatttttatttaatcatagtgttttatttgtactatcaagctctgcccttaattgatttgcattgacgcaatttgttacacagaaattaataaaaaaaaggtgtacatatacatatcctaaacatttctccccttgtagttttttaaaagaaaaacctagttaatattagtcttaaaatttaaatttaattgtaagaaatatagtttcatataagtacgcatttgtttaaatttaaaatttcgtgcatatatgtacgtacttgtttccatatgaacaacatctttttaataatttttaaggtacgtacgagcgtttttttcaaatgaacagttaaatgggttgtccctaccatagatacgtacgtaagttttttctggtacaaacggtttcacacgtatgcacgggatattaggaggatgcaaatagatctaatctaatggcctaaaataacgggtccaccattttaaatgaaaatcgacggtgagattataaaatgacacgtggcaacctacgagtgtttgtaggagcaccacatggcggcgtaggagcgtttataggaagtttaatggacttttagtatataatagatagaagatagatagatagatagattatgggcactataatatagattgaatacctgattgcataatgtaaatcaggcgttaacttagttattgaatagatctcacggaaaaaacgtcagttgggtctttttttcgtcttccccatccgtcccattcttgttccagtgttaaaactagttaatcagaattaaacaaagggagaagcacaaatatgagatgagattgtccagtcaaaggctaagcgaagcgcatcgggtaagatctcctttacatagttgattagttatttacgcagttcacatattctattgtatatcatgttcaaacgaaagcaagcatgatgaatattttgtccatagttcatgttttctaggatatatcgataaaatatataacttcaattgatttaacctttggttatattttaaccggtcagttcttgaaacacaataataaatctcttcttgaaactaggtaaaacatgtaaaaccacgcaaacgagatcttttatgctagtaaacgtgttatttggaacaaaatataaatctaaaagaaagcacgcaaataagaacatgcaagaacacaacgtaaatctagagaaaagcacgcaaatgagaacctatagaccactaataggaaaacgacttcactgatacctacgcggtaccaattcaaatttaaggaaaattatacacttttttctctactagtaaatttattattttatccttcatacctaggtacctataccaatacttaaatactttttacatggtatctatcattgaggagcattggaattttacctaatttagaatgcaaacaccataaaagtttaagagagacatatatgctaattaactgagggctcagccggtagtctcccgtggtttaacgtgtctatttcttcaaatccgagacttcacacatatgcttatatatttacgttaaattattcactactacatcagtttcagattataagaccttctagcattattcacattcatatagatgttaatgaatctaggcacacatatatatctagattcaataatatatatatgaatatgggcaatgctagaaagtgttataaaatgaaacggaggaagtacagtagaaacccctataactattggcccatcattgccggttcggcatgaagtagccaagataatgggatccacccaaaacaaccataatctaggaatacaccgggtgtgctacttgtaacattaccgggtcaattatccctgccgattaatgaatatcactgacagttcatgtaataaatcgatggtatagtagccagccattacaaaaaatatgaagagggtgagattcatcattgtgataatatatgctcccaacgtcccaaaataaaccagcatcgtacgtgatatatatgaggttggtttattttggaatggaggggagtattgaatataagcttagtcagtcagatctctcgatccccatcccctcatctcccgtgcctgtctcgatcccctctcgcctatgatggaagctagtgtgggagaggtgccacctcagtccggttactaggaggctagaacctggggctacaacagctaacaaaggaggccggattgggctgctatggtttggagaaggcaaagggcgcagcaccgggtagaggatggtggcggtcaggtggagatcggaggatgccttgaggtgatagtgaggaggtccagcctccagatttggcagcggcagaggaaggccggaacgggcggtgatggctcggagaagacaatgatggcagctagggcagagggtggttccaattgggtggaggtcataggatgccatgagaaggcagaaagaagggccaggcctagagggaggatgctacgcgtcggacgtccgatagttcgcaaatatcggatgcccaacctctcactgccgcgcacctacgcatgcatccatgcacaaatctccatcgtttctactctagttgattagcacatgtatgtaaaaagtctataggcttgcgcatgcatgactgcatggttcagcacttatctcaaccctattttttatttcttctaaattaattatctaatttatgattcgatttcaccattaaactccttgcaattgaatcttcataacaagatcttgcacggttatattttgatgagaaaaatcgaacgttgtttcaccacttataaaaaaatgttgcaccactagtcaaaatgttccaactcagtctaaaaaatgtttcagataaatacaacattcaagtaatactaaatgcaaaaccgataatatcggtacgaaacattggctctcaatgagtgagacataacaatcttgctcaaatgttccaactcagtctataaaaatatttcagagaaatgcaacattcaagaaatactaactgcaacaccgataatcacaattaaatctttacaacaagatctcacatgattatttttataatttaatcacaaggtaataactattgaaacatcatataatatttgctgaaacatacgaatgataccatgtacaacatttttaattaactaatgaatacttattgaaacactcaatcaacatatatgcaacatttacaaacaaactagtgaaacataataaactacttactgaaacgtacaaataacaccatgtgatacattaaagaaagatatatacattgcgacaataattaagtatgtgcaacataatagactttcagttgaaacatctgattctcacatgtgaaacattaaatttaattggttgaaacatatgtgtgttttttattataatatagtcatgtgagatcttgttgtaaagatttaattgtaacgaatataatggtgtaaacagatcgtagattggatgagtaatctggaagaaaaatcattttcaagtttgctaaaaggtgttatgtacatgcaaataatctcgtgttctctctccttcatacatgccaatgctaagtaagggagcatatgtaacaggtgtgaaaagatagtatctgacaaaaaaggatacaaggctgcatgcagcaaagccacagtgagatgcgtccgatattttttgttgcgtcgaacgtatgatcctaagcattttcgggcctatagatgtggcagcaaagaggttgtgctctgtggatctggcggcaagatgattgtgacacggtggttggcacgataaggtggtgggccagcctgcagcagccaaagaccagagaaatgattttgacagccgggcctctgttcgtgtgggaaaatcaatgttcgcaggtgtctcgcacgaaaacatcgtcggcctaagcccaccacctgctcctctgcctccaagcatttaccgtcgtgctgtcttctccgcccagagcaccggtcacaacctcctctaccctgagcgtagcctcacttccctccgcacctgagcacgctcggtctgtgatggatcacaacttgtaagccgtaagaccgtcggactaggtaggatctgatcacatccacaatgcccgtctgaccagccaccacggctcaatctgactggtcccacacagagataaaatatcaccttgccaattatccactaaatatcaaaaccaatataatataaatcacatcccaaatgttctatataaatcaaaaacactgatttcacatctagaaaatgcattttcggcgacgtaggggtttcttttttgcaggcgggcgtggccttcggagcgaaaaccccgccagcaaagaccataaccggggaggagttggcggtccgcctgcggagatcgattatcgcaggaggaccacataagcgatgcctgcgaagatcaatcttcacaggcggcaagctagtaacgtgcgcctgcgaagatcgatcttcgcaggcatcgcttatgtggtccgcctgcgataatggcactatatagtcatcttcctccccgagccctgttcattcgatccggtgtttctctctcctaaaatgacttaaatataggggggaggttttgaacttcaaatcttcggaggatttttctacggtggttagatctactcctttccaccctaggtacgcaattttttaagctcttagacctcaatttttgatggatctatgcatgcaaaattataaaggaaaagctccatgtttttcgatttacttttttttcatatgttgatgttagatgtatgtgtaatatttgatgccgcttgttgtagtggtttaatgtggtaacataaattcctattttttttttattttgctatcacatccacctcctagatatagatttagatctagacaatatatgagagagaagaaaaatttttatgtctattttttggtttaataaaaaataactatattacttttaatatgcagatgttatgattttgttagattttcctattatactaatttggcatgtctgcataaaccaaattgaaataaactttgtttttcattaatttataaatcaccttcacttagttttgaatagtgatctgttattgttaatgaaccctacaaatttgatattaatagtgcaaatatttgttgttcgtttttttagagatatggacatgcgataatggatgcatcattcgccgagatttttggctccacatggggatgaagtgtttaaatttattggtattgtgaaggcactgttgacagaaaacacgaggcctgagagatctgcttaactctagtgcaggtccaaagctcgccttcgggtgtgctagcatgccagctgatttgatcctgtaatcaacaagaaatagaagcaaagaaactacggttaaatctataaatgatagtcgatcggctaggtgtcgatgacatatcatttatctttgagccgatgtcatatgtgtatcgatcggcagtcatgaataagtaaggaggaactaaatctactggatcggctgtagatattaacaatatatactccttatatcgatatatacttaaatcaagtgattaggatagatcggtcgccatgccgagacagtatatatcacttagatcgaaatatatattaataatgggactatatatgttcgtagcatagccgatcagatagatctagcatgtatcggtgaatactccgataccactctatactaagatattaaagcaagtagaatatatcaaacaaaggcctaatatacttaaatgcaataagatcttaaaataaaagggtagatttaacatgtcaataaagcatctagagtaaatatagttaaatcagataagatcggctgaaattccgatgctaccctaatcggcaaccagaagacaggctagagattgatattctaagcacgacttaatagatcaaacttaattgatgcagcattaagtatgaaaagaagaacaatatctagacaatcaagcccctggaagtttcatagagcggtagatatcttatataacctaacctaatcggccaccctctaccgacagatgttagccgattgtagattagatagcggtattgccggagattatgtaagatatatgataactcgacgaattacataaacgagatcagagtatcataaagatggaagcactaatcccgagaacacaagtcgtcgtaacaagttttaccttttgttgaagatcgaaaccgatgcagctcaacccgaaagcaagaactcgtcgaaataaaactagaacaaaaaggtggcgatgcgccgaaattgtattgaacgtgtgtgttaaaagttacatacgactcaggtctatttatacccgagaattacaagatacgtccataacggacacgactactatctctaacaaactccaagataccataagtctttgcggcaaacttttgcccaagcatatctctaatgaaattacataaaacatcctaattaatagatacaattgccttctcaggactctatccatgtacggcaatcaccttgaagcacctcaattcaacccgatatcatacatcaagttgcattgtcggaatcggctgcatcggcttacctagtccgactcagacccagccgatcctaatcgtagccgatctagactccagccgattcctgctctgtttccgaactcgatctccgcctccaactttgcttcgatctaatcttcttttccgatgccgatgttaccaaatttggttgttaacaggcacatgctgaacagaacaatatgagggagatactttgtccatatactgattgtaagaatgaagtagcctggaaagatgcttctaaagtgatggagcacttagtaactcatggatttatggagaagtaagaaatatggacacgtcatggtgaagaacaaggggacgggcctgaaaatgtagttccgacagaagttgaagacatggtgtacgacgatggtcctggtgcagacaaaattgatctagagtaaaatgttatgtcatgcagaacccgaggtgctgattgggtcgactagaggtttaaatagctttgaagctttacagaaggcagctaaggatgttttgtacaatgagtcaaagtgatgtgacagtgagtttacaacactacaaccagttcttgaacttatgaggttaaaggcgagacatggatggtctgatagtagtttcgacagtctgcatgaacttctgaaggatatgcttccaaggcctaactcactaccatccaacacgtgtcaagcgaagaaactcatatgtccccttttcacttggtgtggaaaagattcatgcgtgcgttaatcactacataatgtacaggaaagagtacgcttctttggaagaatatccaacatgcggtactagccggtacaaattgaatagcaatactggcctataaccatctgacacaaccgagggaactaagaaaaaaatcccgcagcttatgatgtggtaccttcctgtcaaagactgcattaaacggatatactcaaatccgcgagatgcggaactaatgcgatggcatcaagaagggcgcaagaaaaatgggatgattcgacacccggcagatgctcgtcagtggataaactttgatgctcagtacagagagtttgctaaagatcctcggaatattaggtttgccctgagtactgatggagttaatccttttggagacatgagcagctcacatagtacttagccagtgcttctcaccatgtataatcttcctacctggctttgtcaaaagcgaaaatacgtattatgtatcctgatacagggaccccgtcagcctggtattgatattgacgtatttcttgaaccattgttggaagatagggctgatttatggaaagagaggttgaaagtgtgggacgagtacttaagagaatacttcacaatgaaggccatcatcttcatgaccattaacgattatccagccatgttttcagtttcagggcaaattaaaggtaaaacaggatgtgtgatcttcttgaatggaacgtgctataggtatctcatggttccaacaagcttgtgtacatgcgtcaccggcggttcttacgcacaaatcacaagtaacgcaagatgaaggcggaattcgatggcacttaagagagtgatcctccaccaaaacctacatccgaggaaaaagtgtgtgcaatgacagagaaaattgtttgcaaatttggaaaacagactaagaaaccttcaaaggcgacaaagcgcaagaaacccgacaagtctaagaaaccaaaagatagtaagaagccaactagtagtaagaagccagatgataaattccctcccccattcaagaagcattccattggacgagactcctgaagagatagccgaatacaagaagggcttccacaaggagaaaattattactgtcgcacagtacattggacgagccttcttgcactttcaaaataaaagagtcgtcctggccgcttataattttaagtaaattcggtacatttctcttctacatatatgtcttattttagccaagactaattacgttgtggttaatatgtagcgatcattacatttgtttaatcatctaccgaataaaggaaccgtgacagtcttggaccctctcgattttagtcaccactcatacaaagaatttctaacaatcttacagtaataagtgattatgactcttgcatgtataatatgaatgcaatataattaaatatcctccttaatgtgaaatggtacgacatccatacagcgcatacaactactacaagttcaagggtggagaatagacccggacaagggagaagctgctagtacataaatattggccggtaatactccactcacttaatgtattccaattgtttcactaattgcaaaatttaactattttcttttatgatatgtcgtgaagtgtcacaagcaacctagaggcactgtcctctgcgggtattacgtgtgcgaattccttagggttaatgggaggtacagggttaacccagaggatgtaagtctatagactatggactagacaacttcacatatatatgatactaatataatatttttgcatgcagttgccaagaatagaacttcgaacaagctttgacgatacaggcatcacaaatgtccagcgcgatctctgccacttcatccaccgtgagtgctatcatgtgtgaggagacttcttcgacccagagggtgccctagctacaactgacgaattcaagcaacttcgggagtggagcacggatatgccataatataattagattgcgtatttgaagtgacaatgtaaaaaaatattgtaatatatattttgacaacacttttcactgatgcaatatatgtagatttctcaataccaaatgcttgttaattactaataatcttcctgcatcaatttcaattaaataattaaaaattaatttatgggcaaattattattgtatcaaatttcaaaattttctacctaccttcgtaagcggatgtttttattttgcagcgaccgcttcctattttcgcaggcgaacatgtctagctaacgtccgcctgtgaaaattatcttctcaggcggaccgccgccccgtctgggaagacgtgttttgtccgccagggaaaatgctttttctagtagtgtttcccggcgcagacactgacgttccaaattatagtgacataaagatcgaataattttgtctgtcagcagaaggtgtgcatgcagcagaagatgtgttgatacatataggaagcaaacagccagcccacgcacaagaccacgctgaatggttcattcgagcaagtcaagccatagatcaggatttgcatgaatatcatatcggtgtcctatctcatgacgttcatcttcttcaattccgtagaaatggaaggctttgggaattttggtacattcagcatggagaattttgcgacagcgagttcagtctctactacgaatgtgaatgtgtgtcatcgttaatgaatcctggctgctacaagtgaccaactacaggtgagttccacgtggcaagagagcaccgtgccgccagatcgaagaacaaggttggctcacaacaatttgattatctcgcaaaacaccatttaagaggtcacaataatgcacaacttgatgtagttttgtgatggtacactgacttatgaccaatctatacgataatggatcctccacaaaagaaagtacataactataaatataacacactgattaccatatataaaagacctacctaattacttcctctgtttcacaatgtaagactttctagcgttgcccacattcatatagatattaatgaatatgggaaatgcttgaaagtcatacaatatgaaacagagggagtatatgttaactgcacccaagcccatatgaatgacaaaactaacaccgatgcaactaactgcatcttattcagcaatcggccaaatagaagattatgtagttttactggttggatgggctttataagggtttttggttggatgtaacacatatactagtacaatgaatatggacagagagtctgtccagattcattgtaataggatgtgttaaatccgggcaaaagtccttatattttgggacggatggagtattcatttaaccaagcagtcatctcatgtttgaatctatccattgcaggctgtggcaacaacatggagatgactgttgacttctcaccgttttcattcttgcacataaattggtagcttgtcatatttggtagactaacagtcggtattctacctccaatcctctttgcccatccaatatccaaagtgtcctgcccaatccattttatgtcacatgtttcaaatattctttgtaattttatgtacggtttctcacgccataatggcaacaaatctactctcaattgcatattttcttctatcatcatctcatctttagccttgcggacaagttcaattgtgtgtcctaatgggtttgtgcacaagtcattgactgttgtctgaatgacagagcacataagcccattgccatagtatcctgatggaaacttcttccatctcccacgcgcattcacattaatcatcaagcgtacaatatggcaaggcttgtagccaagtgccacagtacgagaccgccatgtaaccgcagttagtagctcaaagctcgtgactgtttctgtgagatttaatggaacatgacgccttagtgcatccatatctatttgagagagaataaagtattcagaaaccatgttttcagtaggcattgtcaccataatatcatcacaagtggcattctctagttcatcaaataatttctcttgtccttcttggatgtggggtggtagacttgttccaacaaagagctcccttttccaaactggtaatatggttggttttgcctcaccgcgtgctatatcaaatatagctttcaagaattgaaatgtgccgaaggcatcagctatgcaatgacaaatgtgagttccaaggacaaatcctccacacttgagatgagtgatctgtcaaacaaaaacaaatgttaatgaaaaccatgcatataaatcaagtttgtgacggtaaacaatggatgctgaaagtattttaagttataaagggtgcaattctgtttttgcaacagatagcaaatgtgtctgtaattaaacatgggatctctcaatatatatacaaggatctaaacgtggtcgttctctcaccacagacactggagcatgcatgggtaacgtcacttcgcactggacagtagatatatttactttaaagataagttttctgacacttcagcagatactgagatatacatagtataaaaatatttggtttattttgatgcctcacataccaatagatactaaattttacaatagaaaacattatatttatgacagcaggatggcagaatcgacgacctcaaaattggtctattttttctaaaaaatcatttctatattataaattacattattcgcaccagttaattttaaaacttactcttcaattgtttataatatacattatataaaagaactacgacgaaaacaattgattactactaggaagaagggatagtagaaatatataagagaataaatataaccatcccatggagaaaagtgcctaaaaccaaataagaaaatagggaaaatgcaaagaccaccccaaaagttaccataagttcaaaattccccctataagaccattcattgcagataccccctcttaattctcttggtttcagattcaccctaatttccgttactcacccattctcataccacacatgcactcagacaaaggctagctaataatacagtcgaccagctggctacaaggttccttataacattccctcagcctatccatataacagttagctctttacaattaatatagggcccatttgtctctttcaaaaagtttcttggttcttgtgtccaagccggctataagggcagtcccaaccctccacttaggatggtttctatggcattaactacattgctatgcaggacttttagcttatgtggcactatattaattaagagagagagagtgaagagaggaagaaactgggtctcatgcaagacccagtttcaacacgagaacctatatgcactagacactatcaagttttgcattgggagagaatagtgtcttcataatagatgaagaataaatatgattggtagagaagagagatgatgtatttattaatgacccactttaagaaattatgggttgtgaagtgtagtttctattgtgatgtcttattgacatggcaccatagacactgcttatgaacatgacgggttgggattgtcctaagtttacagtccgcttcttctctctcctcttttctctcctccacctcagcatttagccagtttatagcctatatgaattgtcgaaacatgatttcggcaataataaaacggggtagcgcacgagacctaaaagtggatggatgtggagacaaaggatttagacaggttcaggccctctcaatgagaggtaataccctactcctgtttagggatttgaatccgccgagtgtgtattgatctgacgatcaggttgtctcatgccccctagagggcctcctgcccaccttatataggatggggggcaggattacaagatagaaaccttaaccaatacggtatcggtttcctaaatctattttacaatattatcgaatcaggactttaggccgctccataatataaaaggaaacgtaatacccaagtcatgatcggttacatattccatagatatatgttatcccctattactagtcggataaccatgccgtgtgggtatggggtacccataatctccacagtagcccctgagaccttcacagtcggaaagataatcttctctcgaactagattactccaaagccgagtgcttcaatcatcctcaccatgatctcccgagtacttttaccaaatatgaagactgtggagggctgaaaaataaagtcaggtgcatcgaatagatgtatctaatagatgcaccaactgagtggttttgataatcgtagtcaaccaagtgacttgataccaatatatagcatatgcggtgtgaatccccgaataatatgatccaagtgatataccgactgctttgtaaaatatgacgagtgtaacctaaagttggctacatcattgaaaattcacatagcaaaatagctataaagaagcttgtatgttgtgaataaagaaatttccaaagtattgggcatacgccatgcgcacactgctttaacagacgtgctttagtccctaaaagacacatagtttcaccacacctggaaatatatggcatatgtggtgtaaaattcgagtaaataaactcataaaggatttaccaaccgcctagaaaatgaccacaatatataatcagcctaagccataatattggtcaaaaaaaatgcacacttacgtggcaaaaagcaatgatattgtatccaatcaattgcttgataaacccaaacagcaccttgactatataaaaaagccagcggggcagctatataaagctttactgtttgacaccttttaagatgcattgtaccaactcctaaaaagtcgagtaactgcggtataaaaggattttaaggtattgggcacttgatcacgcgcactttggcctaagcgaaaagtgcctaagtccctaaaagaacgtgacaggccacacctgaaaatatgggctgcagacatattaggcctagaccaaaaaatatgccttcgacaccctttaaaggatgacgcatgtaacatgctctcgagtaataaatcttccgggtgatatagaccaggtgtagctcatatgaatagcttctgatctaagtgattatcccttatgagatactccaaaatatatataataattgaatcccgacttgcgcaagtattcggttgatagcccttacggggaataataattggtccagtctttgagcatagaaaatagactcatgactatgaatccatgtggaatgtatccggaacaagtccaaattggagatataatcctcacgcttgagttgatgagcccctgagcatatagcttgtccttctgtcatagtcaaaattatctattggcaatagctgacgcagtcggcatggagatgaaatgaccaacatgaagacgaaattgctcatcagaagtaacggaagatgtcagtggtagtaaagatgccaccaatcaaatgtaatgaagttgcataaccatggaggcgaagaaaccagtcggcaacagtcaggtcagctagcagtgaagatgtaggcgcccaacaacaacgaaagaacagtcggtggtgacgaaagcaaaccgacgatgaagacgtagacgcgcatcaacggtgatggcgaaatccaccaatcatgaagatgaagaaaataatcggcggcgacaaacgcatccgacggtaatgatgattagcggcaacagagatagccgactatgatgatgaagtttcccatcaacggcagcagagtaggctatgttgatgaggcttgacaagatgttgatgaagatgacgatgtcggtgatccagtcaatagcgatgtagcagccgatgataacgatgagatcctctatcggcagttgcgtagtaggccaaccgtgaagacaaataattggaggagagttgatgttgttgcccaactcgtctaaaccgaaatatttgaagttgttgaagtagaatgtctgctccgaagtaaagatgaagataatgactcctggagttgactcattggctgattaattgatttcttcagcttgacataaaatttgtcaaattttgagccttatatttgtgtagcccccgactctttggttagttgggaaacaactgaacatagagtcgagaattatagctccttgtcgtcgagtagtcattgcttgattgaagatatgtgttgaaggtgtccaagtagaaatcctgaatattggagagtcacttgttgtagtaaaatatcatggcattgcatgccgagatgtcgaggttcgcaaagacgtcgtggttggtgaagtagtaaaacttgcgaagtagcagcaatagagtttgccagtgccgaagataataaagatgaagtcgttccaccatgatgacaaagttgcatcgccgtgatgaagtgaacacgagtcggcggcaacagaagcaaactggtagcgaagacgcgcagttgtgaagataaaagcactagtcggcggcggcataaccagtcggcaacggaagacgatgatgtccatcagtagtggtagctgtataaaccagacgtagaggtgagggcactagtcagcagtagacgagacgaccggcggtgaagaagataaggccaatcaacactggcagaatcatgcagccatggaagtgaagaaaccagtcggcagccatggcaaacgtaggcagcttgtgttgaagatactgatgcctattagtagtgacagcgatgtagccagccgtgaagaaggtagcatcagttggcgttataacaggccagccgtgcaggcagtgacaccagtcagcggcggatgcggcggccggtcggtgaagacgtagacgcccaacaacggcagcataataggccagccgtgcaggcggaaacaccagtcggcggcggtcgaggcggccggtcggtgaagacgtagacgcccaacaacggcggcataaaggccagccgtgcaggcggaaacaccagtcggcggcggtcgaggcggccggtcggtgaagacgtagacgcccaacaacggcggcataaaggccagccgtgcaggcggaaacaccagtcggcggcggcgaaggcaagccggtcggtgaagacgtagacgcccaacaacggcggcattaaaggccagccgtgcaggcggaaacaccagtcggcggcggcaaaggcaagccggtcggtgaagacgtagacgcccaacaacggcggcataaaggccagccgtgcaggcggaaacaccagtcggcggcggcgaaggcaagccggtcggtgaagacgtagacgcccaacaacggcggcataaaggccagccgtgcaggcggaagcaccagtcggcggcggacgaggcggccggtcggtgaagacgtagacgcccaacaacggcggcataaaggccagccgtgcaggcggaagcaccagtcggcggtagacgaggcggccggtcggtgaagacgtagacgcccaacaacggcggcataaaggccagccgtgcaggcggaaacaccagtcggcggcggcgaaggcaagccagtcggtgaagacgtagacgcccaacaacggcggcataataagtcagccgtgcaggcggtgacaccagtcagcggcggatgcggcggccgatcggtgaagacgtagacgcccaacaacggcagcataataggccagccgtgcaggcggaagcaccagtcggcggcggacgaggcggccggtcggtgaagacgtagacgcccaacaacggcggcataaaggccagccgtgcaggcggaaacaccagtcggcagcggcgaaggcaagccggtcggtgaagacgtagacgcccaacaacggcggcataaaggccagccgtgcaggcggaaacaccagtcggcggcggcgaaggcaagccggtcggtgatgttctgactgatccattcctggagcgtaagagataagcttaaagccatgaatcccttttatgcatatctggatctggatcctgcaaaacaaacatataggatgagtagtatctgatataaatataatactcgagaaaaaatcaagtattttaaaatatttataaatatgtatttctcctcttgtcaatttcgatttccccgagcagatgactctgtacgtttaaacactctgtccgactagtcattgcccccaagcatcgggagtcggcctaggcatttcccaaacatgcatatgagtgacatgagttcgtcattaatggaacaaagtttcacggatcagaatttactactcaggtacttttgcaattattaagagcagaaaataaatttatctcatctctatgcttttgatttattccgaataatacttagcaccttgcattactcggtccatccaacgagcccccgggtgctaggaatcggcccaaaggcagccatccattggcaaaccaaacggaaagcataggaagatagaactccataactcgataggtacttttgtactcagattatgtcgcaagcaatcaagataaatattatgaaaaatatgatataacatctgtagcccccgactcactactcaatggaagaccaattggtgtagtgaggcagaggaaaaggaaaaatatcatataaagaataaaataaatgatgacttagctttgtaatattccccttggtgatggcagaagtggccaatgtgggaacaaagtcgtccatcaataacaatgaagacaccagtcggcagcgacgaaggcggtcgacggtgaaagcgaagatgcccactaacggcggcataataggccagccgtgtaagcggaaacaccagtcgacggcaacaaaggtgagccaacggtgaagatgtagacatccaacaacggcggcataataggccagccgtgcaggcggaaacaccagtcggcgaaggccagccggtcggtgaagacgtggacgcccatgaacggtggtgtgaccaaccgaccgtataggcggggacaccagtcggcggcgacggaggcaggccgacggtgtagatgacgatgcccatcaacggtggtgtgaccaaccgaccgtataggcgaggacaccagtcggcggcgacggaggcaggccggtggtgaagtcgtagacgcccaacagcagcggcataataggccagccgtgcaggcggaaacaccagtcggcgaaggcgaaggccagccggtcggtgaagacatggacgcccatgaacggtggtgtgaccgaccaaccgtataggcgatgacaccagtcggcggcgacggaggcaggccggcagtgtagatgacgatgcccatcaacggtggtgtgaccaaccgaccgtataggcggggaaaccagtcggcggcgacggaggcaggccggcggtgaagtcgtggacgcccaacagcggcggcataataggccagccgtgtaggcggaggcaccactcggcggcaacggaggcatgccggcggtgaagacgtagacgcccaacaacggtggtgtgaccaaccaaccatataggcgaagacaccaatcggcggcgacggaggcaggccggtggtgaagtcgtagacgcccaacagtggcggcataataggccagccgtgcaggcggaaacaccagtcggcggcggcgaaggccagctggtcggtgaagacatggacgcccatgaacggtggtgtgaccgaccaaccgtataggcgatgacaccagtcggcagcgacggaggcgggccggcggtgaagtcgtggacgcctaacagcggcggcataataggccagccgtgtaggcggaggcaccactcggcggcaacggaggcatgccggcggtgaagacgtagacgcccaacaacggtggtgtgaccaaccaaccatataggcgaagacaccaatcggcggcgacggaggcaggccggcggtgaagacgatatcgccatcagcaacggcagcggcgcacaccaaccgtggaggcgatgaaaccaatcggcagcgacgaaggcggccggcggtacatgtataaaataatagatcaaataataattagtgatctgtgaattaattctaatttatataagaaaatttagaacgataaaccagatccagatagaatttttggcgacgaagaccctgcccttttgttgagaggatcacggccaaagacaagagtagcaccgatgatgccggcacaaagttccatcgcacttctcgacggaaaactcgacgcaacccctacctggcgcgccaactgtcgaaacatgatttcggcaataataaaacggggtagcgcacgagacctaaaagtggatggatgtggagacaaaggatttagacaggttcaggccctctcaatgagaggtaataccctactcctgtttagggatttgaatccgccgagtgtgtattgatctgacgatcaggttgtctcatgccccctagagggcctcctgcccaccttatataggatggggggcaggattacaagatagaaaccttaaccaatacggtatcggtttcctaaatctattttacaatattatcgaatcaggactttaggccgctccataatataaaagaaaacgtaatacccaagtcatgatcggttacatattccatagatatatgttatcccctattactagtcggataaccatgccgtgtgggtgtgggtatgggatagcctatatgaatactaatagacgaggagccgtagtcatcactcaggtcagccattcccgatgacacaaactgaggcatcctgactcacggtggccagccattcagcacgtcattggggtggtgatgatccagagatttcgctttaaacatcggggttaccgaacataatctattgcgtttgtctcatatacagagttagacggtagctggtttctttgatagatccaaaatgagaaagatgatctcgatgtgatcatttctcttttaaaagactgaaaaaatgtccttgcgttgcaacgggtgaagtctattttaattttattattgttatatggtttagttaagataaaattcactgtgggagttcgtttggtcatatatttttagaaaatcatgagctacagttaggagtccagtccgatcatctcaagttagcatacgagtttttttaaacatactttctatatgattccttctgtattactaatagtgaacgatcttaaaaactaactcaaatacggaactcaaatacggatatgtatttccaaaagtaaacgaacttaataaccgactcatacagagatgacatgccaaaataccggcaaaaacatctttaatttttatattactactggtgtgtttgggtccttattcatcaacagatacgctaagtcatgtcacacatttggaagtgaaagaaaacacatgaacgacggtaatcgttgattaaaattaaacaaatgtgaattaggaagggtattagcaactaatcgtcttatagaaagaaatctaagcatatgggggtggtttttgcaattttcccaagaaaatatggggtcatatttttagcaaaaccgttcttaatgtatgcaatataatcaagtggtgtttgaaagcatatgtatctcaaggactcaaggtgtttggatactgccaaataaacattttgatcaattaagcacatatgagtaatggtcaatccatgcttgcatgctggatttacctgcatgtaaaacagtggcctcccaacgatgactctggcgtctccaacatcgcacaggaacccctcggcgccatggaacgtcggcatcggtggctcgccgaagtcctccaacgttgcctccgcctctgcctccacgaacaccaccccttcggcggtgcactccacggcgagcctgtggcccttgggcatctcccgcaagcggccggcgatcgggtagtagtacaccagggcctctgctagggccgttttgatgctgtcccccggtctcgccggccaatgatcgccgtctaccgcgtggaagaagtcgaggcctggctgcaggtagcgcaggtcccagtggtcgtcgaggtcagagaggggcttgctctcttgcggcgtcgccctcgcgggcgtaatcaactcagggtttccccagcggcgtgacatgaacgatttttgcttcatgattctatatgtatatgtttggatggatgatgatggaagatattgcagctacaaatacaatgcgtgccaacaatttgtgcatgtaaacacaactgatgagtgctacactttatggaaaggtttgaatttatatatacaagcttaggaatattccttctgttttttaatagatgatgttgttgcctttttttaatatatacaggttgcacctcgtcactgtctggtttgaggagtaggtgtccagtctggtgggccttggcggcgtggggtttgaggaaagtgacgtgcacggttggtaacagatcaaggtgtggaagtaataatggttaggagaggttgcaccttgtcgctgcctggtctgaggaggagtccaatgagtgggctgagatcgtgtcattcgcatcacgcataggaaaagagggagggagaagaagagaattaggttaatatgcttgcacaaatcgtggcacacaattgagctacataaaaatgacttaaatttgtcgaaattttctgcactaagaactagacatcgcaattgcactactggagaaacccaaattggtgtcggttaggaactggtcctaaaccaatttagcggtatcaatgctgaatagcatatgtgcacctataaaaaaaaagtataggctattacattataagtcctaatagatgcccgttatgttattataaccgataccttcggctagaataggtgccggttatgttattataaccgataccttcagctagaatagttgtcagttattaccttataaccgacacctattctaactgataggcactagttattttgttatgagaaggcaattgtcaaaatataagaatttttaggattagagatgtgtattaaaatagtagttagaattacatatgtgaacattgtgaacattgtgactaggtatgaaaattaaatagtagagtgttgtgattgattgcaaatagaatgttggtgaaaaatttgttatatttgaacacaaattttaaaggttgaaagttgttatgatttgagaagggcttttctttcttggatagaaaaacatgtgactaggcgggtgtgtttgagaagagaaagaaaggagtttggagaggtacgcaaatcgaggtgatcagctattaacgtgtgattaattgagtattaattattttaaatgaaaaatagattaatatgatttttgaaaaaaaaacattataaaaaacacgccatttagccatccgaataggatttgctcaaaaaatagtccactcttctccaattcctttccatcacaaatgattgctgcctaaacttgtttcttgcctacagagtggctgtactctgcgtggcctttctgttttttttcccattttattcgctctcgatggtcttttcttttttaaggcgtctttttttgtaaggcaagatcgaggccaaagataggctctgtagggattcggatcgtctgatttgcgaagtaatgtcacgggcgtgcagttataccacatccagagcaaagatgatgattgctacgtctaatgggcatgctcttaacgacattttgtatctcaaagtgtttggatacggctgaataaacatttttgacaaaattaagcacatatgagtaatggtcaatccgtgcatgcatactggatttacctgcatgtaaaacagtggcctcccaacgatgactctggcatctccaacatcgcacaggaacccctcggcgccacaaaacgtcggcatcggcggatcgccgaagtcctccaacgtcgcctccgcctccgcctccacaaacaccaccccttcgccggtgcactccacagcgagcttgtggcccttaggcagctcccgcaggcggccggcgatcgggtagtagtacaccagggcctccgcgagggccgccctgatggtgtcccccggcctcgccggccgacggtcgctgtcgaccgcgcggaagaacctgagggctggctgcaggtagcgcaggtcccagtggtcgttgaggtcggagagcggcttggtctcgcacggcgtcgccctcgccggcgtaaccagctcggggtttccccggcggcgtgccatgaacgatttctgcttcatgattgtatatgtatgtttggatggatgaagatgtaagatactgctactatacaaatacaatgtgtgccaacaatttgtgtatgtaaacacaacttatgagtgctagagttcaaggaaagggtttaatttatatatacaagcttaggaatattccctctgttttttaatatatgccattgatttttaagatatgttggatcatttgttttgttttatttatttattttattgtgacttgatttatcatcaaatgtttttttaagcatgacttcaaattttatctatttgcacaaatattttaaataagactaatggtcaaacgtttgtcaaaaaaatcaacagcatcatgtattttaaaaaaagggtaaagtacgccagagactaagagaaggaaatatttagttccggacgctggatagggcagaacctatcgctgccaccgaaagggctgtatcaccaaaagaaaacgtcaggtgaatatatatatatatatatatatatatatatatatatatatatatatatatatatatatatatagtgaatcttgtgtgttcacacaagtcattttctgttgacccctatgtgtcttgtgtgtgagtcttgtgtgtactcacacgtcattgtatatatgttgtacatctaaaataaactcacggcttttatttacatatttgagggcacattttcatgtgccggtagcctggtagcgtggtagctagcatagtacgtacgtaccacgtgaaattcctcttccaggtttgattagaacctctaatctctaattaccgtgggccaaaactccacgtacggtagatatctgagagagaaaccttaaaatgagatgttctatctgacatatataattattaaatatatgagtacgtgataacatacatatcaacggattacagcagactaggtataatattccaagttatatatatgcattggctcaagattaaaaaaggttaggaaaaaatggcatttgtcaaaccatgctactagcataaggccttgtttgtttaatccccgagagaggaggaatggaggggatttgcagagaataaatctataccataatagatatggaataaatcccctctaaatctctctcaatcctcttatgggagggattaaacgaaataggtctctaaacataatttttgcctggaatgtgacatgtattctacgttggccatttttttacgtctcattcgtcttttctttttaagaaaatactccatccgtttcacaatgtaagactttctagcattactcacatacatatagatgttaatgaatctaaacacatacatatgtgtagattcattaacatctaaataaataaatatggacaatactaaaaagtcttacattgtgaaacggaggtagtaggacctaaaagtatctcgattcactagaatatttaactagctgccacttttacatgtggcaagtaatgatttgctatcttaggctgacatgtcaatgacatataaaggtacatatgtcattgacacatagtttaatgctaaacataaaagtgataaatagttaaagttagtacttacagtacacaacttacacgcgtagaggattgctagatgccagcaccatcaacagtgtcttcccatttggggaggctggaatactggatagagaggagggaactcggaaaaagaggaggggtaagagcatctccaagagaatagctaagtgactctccaagccaaatattagccagtatagcaaaaaaaaaataccctccaacagaatacctatctcgctggccaagttatcctgctgaccaaatagtcccaccggctagctaaatctggccagccacaacccactagccaacggtggcccccacacgctggccactggcccaccgcaagaaccccgttgcctccccctccagcgcaagcgcaacgacgaggagtagccgcgccgccacgagtccccccgtcgtctcccctccggcgaaagcgcaacgacgaggagtagccgcgccgccgcgagccccccgtcgcctccccctccggcgcaacgacgaggcagcagccgcgccgccgcgagctccccgcgacccaaatctccccgttgcaatcaagatagaggggagaagggaagaagaacagcggcggggcgggagactgcgctgtccactgcctccatcttcgcgccttcgctccgacctcgccgaagccgctgttgccgaggtccccgtcgtcgtcaaggtcgccatcgccatccaccgttgctgccctcctctgtcgccagtcgtcgctgccgtcgtctgcaccgtcgccattcgttgccgtcatcaccaaggtcgccgtcgtctagaggcctctggccccacgcggcgtccgccgccgcctctgcccccgccggattcggggtgggggcgcgacctccgccgcctccacgcggcctccggccccgcgcggatttggccggcggggtggattgggggggccgcgcggcctccgcctctgctccatgggtcgccgtcggcacacggtcttcgttgcgcacttgcacgggaagggaggagagaagaggaagagaagaggaagagggagagaaagaggaggaaggagtagtagaggctgacgggttggtcccagtgtcatagactcgtaatagagagtgtagatggagaggctgttggagtgaggagtgagtttggctcgccaaatcaattggagagttggctatatgggtgtttggagagtccgatttagagaggctgttggagatgctctaacttaccagtgataacggcagcaatcttctctatcgatgacaagatccttctcttttgggatatttaactatttaacacttttaagatgtagcatttaactatttaacatttttaagatgtagcatttaacaatttattactcataatatatgacatgtgaacccttgtgtctgtatatgatatgcatgtccaatgataaattattaaatgatacatccaaaagtgacaaatagttaaatatatctctcttttcgagcgctgataacatcccaactctaacagaggatctatggtttaggattgggatcatacagtacaacagaaataaaggatctatgcagtcggccagaagacatcttcacaagcgggcagtgcaatctcttgccgttaggtgtctatagaaatcaatatttttctaagcggacagcacaaccgcacgtgtaaagtgattttcgcaagtaatcaagttacgccgcccgcttgcaaaaaggaaaaacgcgaaacaaaataaaaattacaaaagaaaattaaccccggctttggcgtggtgccctccactattggagaaatgttctttgtccggacggtaaaaatcacattagtcccggttcaaaagtccaatgaaactttatgatctaaagatcaattttagttccggttcaaaaagtcatcagactgccactatttttagtcctggttggtaacaccaaccgggactaaagatggatcttaatcccgttttttcatagcaaccgggacaaaaaaaaatcggagcaaccgctcagccacgcctccccacctcgtgcttatcacctcgatcggcgcggcctccacttcttgcgttatgtcctcctccactccacacgcgacatgcctcccctctcctccacttctccccttcccctctccgggggaggcagcacatgaggcggcgggtggtagcttgatctggtggaggggaggctgggaggtggatgcggctgcggcggcgcacgaggacgtggcagcggtggcacacaaggccatggcaggcggaggctgctgcggtggcggatgtggccgtggcggccaagaggcaacgggctaggatgccaggagggcgatgggatgggaagcggcgcaccgccgggcgaccgacagatgtggctttgtggttttattttaggttttttttgaatgatttgtagattgtgttgtatatatttttagatttggggatgattttgtgaattatttgtggattgtggatggtcatgtgaagtgtggattattttgttgtgcatgatttgtggggatttcggtgtgactcgttggtgctcgaaatcaatagatgcaagcagcaaaacacaatgaaaaaaagaaaaaaaaaattgtagtcccgattagtaacaacaactgggactaaagatgggcatctttagttctggattcgggctcccggtatacaacccgggactaaaggggttgcaaactgggactattgtgggtttctctaggagtgcccggacagccactgccaatggaaccacccattgtcatctcagcaagcagccagctggtcgtgatcacgggcatcgttgcgtcactgagatgaaggtaccgtcattggtaaagccgtcactgagaggaggcgggagagccagatcctccatccccaacctcccccgtggcgggtcagtactagaaaaacctccaaatcattttagttggggtgtttacaaaaattatttttgtattagtgatattcctggtaggaggggagctgggagataaggaagaggggtttgttagtcttagcgggacgactatgtgcggccgtcggacagctgatgggtggcggacacagcaggttggcacctgaggaggtgtattgctgcgaaagacgtgggattggaggaaagtgacgcacatggttggtagcggatcgagatgtggaagtaataatggttaggacaggatgcacctcgtcgctgcctagtttgaggactccagtctagcgggccatggaagcgttggaacaggtgagtgggcgagaacatcttgttcgcatcacgcataggaaaagaggtgggggagaagaagagaattaggttaatattcttgcacaaatcgtggcacacaatagagctacatacaagtgactgaaatttgtgggaattttcagcactgaaaactacacaccgcaattgcactcatggagaaacacatactggttctggctgggaactagtcagaggtgccggtttcctagctaaaaccaatttgatggtacaaataccgaataccataggtgcacctgtagaattataggtatcagttattacattataatcggcacctataagtccaaattggtgttggttatattattataaccgataacttcagctagaatagttgacggctgttaccttgtaatctattcgaacttatagacactggctattacctagcaattgtcagaataaagaatttatcggataggacatgtgtattaagatagtagataggattaaacaaataacggttgtgattggttaagttgtagatgtaggtgagaaatttaaatggtcgagtgttgtgattgattgaaaacagaatggaaaaatatattatatttgtagacaaattctaaagaataaaagttcatataatttgggatagaggaaatagaagttcttcatcccacaaaaggcagatagggaatagtattttttttcttgaatagaaaagcatgtgactaggcgggtgtgtttgaagaagaaaaaaaacgaaaattgagaagatacgcaaaacgagctgtgaatcattagtgtgtgattgatagtagtattaattattttaaacttaaaaaatatattaatatgatttttgaaagaaattttaaaaatgtctctttcaatcacaaatgattgctgactaaacttgtttcttgcctttagagtagctgtactctacgtggcatttttttcccctattatagtctcttacagactggtttaggattgtcttttttttttcattaatttgcggccctttgtgcaagctgcatgctggaagcctaattattaatgctgatgaatcaagacgcctctacggccgatctcgggcctcttgcctttaaataaaacgaacgccttaaaaaagaaaagaccatagtgtctagtccagtcctcggaagttcgtactctctccgtctttaaaaaaaaataaataaaccttaagttttcgtgtctaacgtttaaatgtccgtcttatataaaatttttttataattagtatttttattattgttagatgataaaacatgattaatactttatgtgtgacttgtctttttaattttttttatatttttttcaaataagacggacggtcaaacgttaacacgaaaacttagggtttgttttttttgacagagagagtatactagatggtacgtgttgtcaggtggatgcaacaacagagcatgacatgacactacaggtcagatgggctccacagaagaggtgcgagacgtggcctggctgctgggggtcgacgtaacgtcggcgccgtgaagttagtttatgccgaaaacgctatgtatcgtacgtccgaacggagaaaaaaatatcggacgaaagcgttacggtggggcccaccacccatccttcccgcaacctcctctcaaccttatcctcttttgctgctcgctcttctgcttcacaaaaaaatttcccattttacgagcgaggcggcgagaaggttgtgcgccgccgcaacttccttgccgcgatcctcggcgatggcgggcgacacgcccacaacaacgatgtcggcggcggcaacgacgatgtgagcgcgaaggatcctccccggcggtccacctcccagctctcctcgatagtccaacacaagcggcggccggatgccaatagcgcggtggagtcgccgcagccgccgctggacgaggcgcccaactcacccgaaggcagtagcaccagtagctggaggttccctttccccttgccggcaaggcaggcaggcagcaccgccgcaggaacactggcatgggcaccagcggtgatgggatctcagaatagaagaaggcagaggtgtgtttgttttgggaattttagtgaagttgcatattatttgtatctttgttgcactttgttctattaagttgtttcgttctgttttgattctttgttgcatacatcgatttttggtgttgcaatccgtatgttcgactattgatttggttgaaacaattttgatcaagcattgaaacattttttctctgctagtgaaactttcactcattgttgcatatatagatttttggtgttgcaatcggtatgtttgactattgatttagttgaaataatttttctgaaacactgaaacatttttctctgctagtgaaacatttaaaacattttaattactgaaacaatttttatcaaaagatgaaacatgtgaaacatttctgaacaacacagtgcaacaccgtccgatgatttccataatatcggacgtccgatttgtagcagcctccagtttatgctggtgaaatggattgatggctggacggaccacgcgtgcgcggcagcgtaattcggtaatagggcatgacaattaataacagtcttctcagaattgttaacttcacatgacaagattgatgaagggtagttctctccagacaaatactccctccgtccaaaaaaaaaggcaaaccgtgaattcctgtgccaatgtttgactgtccgtcttatatgaatttcttttataattagtatttttattgttgttagatgataaaacatgattaatactttatacgtgacttatctttttaaattttttcataatttttttaaataagacgaacggtcaaacgttggacacggaaaccagtgtttgcctttttttgggacggagggagtacaccagaaggccagttcacttaatggatatgaaaactggcaaaggaacttgattttaggcgatatagattcgaaatgacagcttctcgcacaggtgttgaataggcaattagcaaggagaagaaaaagtttttcaatccaggagttctaatctctcctcctcgccttgtttagttcgcgaaaagaaaatttttggtattacattgaacgtttgaccgatgtcgaaaggtgtttttggaaaaaaaaaactaatttcataactcacctaaaaatcgcaagatgaatttattaagcctaattaatcaatcattagcacatttgagttacagtaacacttatagctaatcatgaactagttaggctcaaaagattcgtctcgcgattttcatttaaactgtgtaattagttttttaatctatatttaatgctctatgcatctgttaaaaattcaatgtgacgtttttgctaacaaaaatcagaaactaaaccaggcctgatatgagaaagataaaagaatagacagacaaagatgattcttatgtatgccaactacttaatatgtacacttaacatttatgaaaggaaaacactgatgcacacgaaaggagaaaagtaaagatgttggtagatttatcggctaagtgccgatcagttagttgggaagggataaattccacttatccgtttcctaacaaaaattaagagatagaagtactatgatcggttaaatcaatctcctaaccgagttggacatataatccaatccctctcagtacctaatataaagagattaagtgcacgtgagaagggacgacatactctctgacattaccataaaaccataaggctgtgttcatttgggtgtgttaggaacaaatctcctgtgcatggaaaacggattggtcaattagcacgtgattaattaagtatttattattatgttttgaaaaatggatcaatatgatattttaaagaaactttcgctaaaattttttttataaaaaacgcaccatttagcggtttgaaaagcatacatgcggaaaacgaaggaggtgagctggggaaagaactcagcctaaatcacccattcaacttagcactagaaggggttcgtgagacgatgtcgggaaaccctcgttggtgaaagtaagagaagagaagagaaaccaaattaagaaggaatgaagaaaaagaagaaacaaatggtgaaaataaataccgatagcttctcaagcaggtcggtatattaaaaattatgcattaagcggaggtgattatggatcggccaaatcattaagatcttataaatttaaactccatcattgtagtttcagagcctaagtttagcctacttaatctctcatcgtccctgtttaagccatatgtgcccctttgaaacctccaaaatttattcggcttgaagaattttaagttaacaaggaagatagcccgcgcattcacgcgggcatgtgtcgtacgctaagtttgagatatttataagagcgaaatattaaacagagaatatctaccatgatttctccataaattgttttgatctgtattaattgcttttataattttctaacctattagttttatactgtataatatttaaataatatctataagcaattatttgtaatcttctttatcatttgaaattaaggtagacttattttttaaaaaaacatgtcaacgaaagtaaaaataaggtgtttttgaaattgcatatctattatcatagttcattaaaggattaattagatggaacatgaagctccactaaatgtttgggtttatatagtctaatatgattgatgtagtttaagagacgatcatatatgaacatttcttatagggtgggtgagaggctccatgcagcctaatatgaatacgataacgacgaaatataattgcgcaataatattttgaaaataccatgtaccacgaatgcattcttatttttttatgtaagatagatctaaccattataactaataatttaccagtttaaaaggcataggagtattgcagaaatgtagcttaaaaattatggttgttttaatatccaactttattgcgaagtgagcgcacctcaactggttaggtttcttatggtggaacttgcccacccaagttcaagtcctagatttgacatgggtgttcgtatttatgactaattattctttcagtggtaggtgacataccatcgatagcgagacgccgtggtaacttcttcaatctcaaaatgtaccggctcagtggtcggtgacgtacccatcgacagcgaggcgtcatggtagtcttttatattctttctgttttagttttatagctaagagagagggaagggacgctaaaatctatttgattttttcttaaaaatgtatggatttttgaataatagctagtacgtagaatatgtatgatccaaagtaatgatttttttttaataatatagttaacttggttctttaattttaaattttatagtaaataatctaatttatctcctacttaggctacattcgatctctgctacatttgatctcatcggttgagcttatgtagggcacacaaaacgacataggccattagcgcatgattaatcaagtattaaatattacaaacatgaaaataatttttttaaaaaaaatgtattgaatgtatttgcacaacacgcatagtttagtagtttggagaacatgctcaagataaatgagggagccaatttgataagcactttacagctcaaccttaaaattgttacttatgtacttaaaaaaaatatgtacaaatcaaatgcgtatatcaatgttacgtattttgttccattcttttcgtgagtagcgaagtacggaagtacgtatacgtacgtgtgtgtgtatatatatatatatatatatgtgtgtgtggaatgccttttaaataaactaggaaggtagcccgcgcattcgcgcaggcatgtatcgtgtgctgcatttgaaaacggattatatttatcagatagcctctgccatgttttggaagtacatttcctcagcaaatatttttcgttgacatcacgttgataatttctctatgctatatactatatagtatttaattaatctgtataagcaattatctataatcttcatcatcatctaaaaaggagttagacctagtttgtttagaaaacatgtttattaaattaaaagcaaggtgtttttttcttttttttttgttgaatgctttgggccctgatggtgaaaacataagacagctaaattcattgttccttttcccctaccatatgattttcatgcagctcctagtcaccgtgttgagatgtggtcattgcacctatggaggttgtcttgtgattcatcgtacttgtgatcactttttttgtcaagcttagttactcctattttcatttcttgttatatcgtaaaatctaaatggactccaaagttaatcattaaagtatatatgtacaacaaaaatatatttgcagacaattaatgttcatatatagggatgattcaccttttgaatgatctatgcacaaagaaaataaacggaattacccgaaatgcttagaaggccagaacaacacacttgaacatataacaatgatatactaattaaaagtgcattaagcaccatctaaagtcaattagatggtaacatagtttagagcagatacacgaaagatcatttagcttgcttggattattttagcacatttttaaaaaaaatcatgaagtaatcagatattctctaactaaagccattggattttcgatgcattggtgctttggacttcatattttagttagtcctatttgcttagatagtgtatatctaatttagctatgcatgtttgacaaacaacatatgatgatgcaacctgtattggattatttcgtaattcttttacagcaattcaaatgacatgtaaaagggcagggatgttcttccttaataaaaaatgtttcatagttcactttgaaaattttgtttggataactattgatttaatttagctatacatgtttgcagaatgatgtatagtgatgtaatatgtgcagcaaatttgtttaaggtaattcaatcatatttggatggtatgcaaagcgcgcgggatgaatgtggctgaatgtcatattttgtacataggaaaatataaggatacggatcttaaattcttagtttaattataaacagagcaacaattatattagaaatcaggcgtagattaaaaattatggttgttttaatatattaattatttctcttttagcttactcatacccaaaaatagggatgggattagcagtggtcttcacgcatgtgaagggggcgaggaggtagatgcgatttgtttttataacttctccaaataatgtaacttaaaaccaatgataacaggtttaattttttctcaaaatttctaagattatttatgattttcaggacaagacatgtggcggcgtaagatttttcgtaaattaaatttaatggttgaaaataatggtccatgaatttaattgaaatattttataattttaaaatgtgacatatggtgacttaagtgtgctctaaaggtgtttaattggtttttattacgtagactgatttaatatgaataatacatgttttcattctattataatttttcattttcattcagtttccatgcaaaggagtattttaatttttatatagtaaaatacaactataatggatattgaattattcaattaattttaaataaaacaatagttaaaataaatgaaaaaaaataaaatataattttagaaattataagccatttagctttttttttaatattaggttgttagataaaaaatataaggcgagagattagaggaagtatatgtatagcaggacgagagatagagattttttttctgagacatattccaacggatcctagtctttagttatctatttttaaaatatagatataattttagatctattagaaaatgtgttgggtgttgtatttactaatataagctaaatgttgccaatcatatggtttaaaaatctaattgtatcgtgtgaccaataggtagttgctagcagcatatgacccaaagaaatacatttattttaaatgtagttaatgtaggtattgaattctaaattttattgtaaataatctcatgctgtgcatagataaaaaaaattgctatttagatggtatagttgttgaaaataatttattacaaaatatgtttttcaatattaattaagaaaatgcttgaaaataggagggcatgtcgccctcatgtattagggtgagggcaaggatatatgatacataactacgtacatatacctaacgtaatgtaatggatggcagcggtggggtgtgggcctttctttttctttttttttaagtaagtccgatggtagaaaatatgggtccactgtatattagtgaaagtcgatggctagatgttttgttttttctataatttgctagagtgagacatggtgagatgagagcatttgtagaatgccatatttttaacggtttaagagtgtttgtagaatgccatatttttaacggtttaagagtgtttctaggatgtttaatagacttttagtatattatagattatcaaacaactaactattatatatcagccccatacgtcgtgatgtatttaggaccacaatataacttttataatttaattaaagtacaacggaatcacaaattggatatataatttaaaaataatttagaagatagttcgaggaacattgattggatattttatattattattatagatcttagtttaactatatatatttatatttgtgttgtagtttttttagaaaacagatcatcgatttttatgatgtattattttattatcttttctatgtacgtgcgtactgtttttttcttttctttccagtgaacagtacgtaaactatttgttttgtttttgtgtaggtaagtacgcacgggagaaggacgtggtttgcatcgtatcaacttgtacgtacatggcaacaatagtagtgcttaaatcatacaaagagaaagttattattttttaataatagatctaatccaatggtgtaaaatggcggatccaccaatttaagtgaaaatcgatggtgggatttgataatgccatgtggcggtctaggagcatttgtagtacaccacgtggcggcttatgagcgtttgtagtgttaaatagaccatagaatttatatactaaataaaaatgactgtcatattcaaacagaaatcactttgtctcaattttatgtaaactcgcctatcaccatcctccgcaagatttttttttcttttattatacatctaattcacctatgtatgtttatggataatatacgaaggaataatttatattgttgaaattatttgtgctaattgttaatgctatttacatgagaacgacataattaaaaatgatattatatggttccatatgacattttcgattgtacgtatgtatatatattttttctagtgaatagtaatatgtcgtacgcacttacttttttccttttttgaacaaatatttttctctcatatggggtagggtatgcgtatatgtattcatggagtgagtatgtacacgtttatatgagcgcctatgattacctttacaatattttaaaaaatctttcaaaaaaattggtgggatggcgtgaagtggcgccatagcggcgttgattctttgataacatcgccaggagtggttgctatatacatgtataatttgaagaaaaccttagggctataaagagagaaacagaaaactaccaagatgggacagatcgtatgcactcttctctttttcttcttttcgatatctcttgtgtgcatacgtacatagggatagattagctgatttttagaagcaagggattagaatatatctaatctaatggttgaaaatggattcatcggtttaagtgtaaattgatgaccagatgttttgcctttttttcttatatttagcgtcacatagcatcttaggctgtgttcggcagtgactgttcccatcctctcctcctcgttttccacgcgtacgcttttcaaactactaaacggtgcgtttttttgcaaaaagtttatatacgaaagtcgcttaaaaatcatattaatctatttttagaaaaaaatagctaatacttaattaatcatgcactaaatactgctccgttttgcgtgccaggtagtgagggttgggaaccctcactcccgaacgcagccttaggagtatttgtaggagtgtaggaatgctattactcatactcacaatctattgtagtcaactattatttgatgtggcttggtggcactctctatttatctatcatttgttcatacatgcccttagcctgagtttggaactgagagttcccagctctcctcactcattttccgcacacacgtttctcaaatggctaaatagtgtgatttttgcaaaaaaaaattctattggaaagttgctttaaaaaatcatattgatatatttttcaagtttttttaggataatacttaattaatcatgcgctaataaactgctccattttccgtgccagcgggaaacattcccaactctaacgaatgaaaagcagcattagtattgtcctttatcctctgtgcttcatgacaaacgtgttcattggatgtcagctaattattagacgcaatgtgcatggataccatgtaagcaatatgacttggcaattggtggatagtggtttgtatatagaacttagggataaattagtggggacattattgaaaaattatatattgtatgctacatattagttttagtacatacgtaatatatttatagttaagttctaaaacactaccgaattgctaaatggtgtgtatttgaaaaatattttctatacaatttttttcaaaatcaaataaattcacttttgagtttataatatttaatacttaattaatattgcgctaataacctacatcgattcgtgtgccctggacatgctcaaccaatgagctagatggaacgaaggctaagtaggagataaagaacatcaatatggtgtcaaaagaatatatttgttctttaattttctaataatatatgaatagagaaaacacaaaatacatgaaaagtacatttatgataaatttagaagtgtcattttgatatatgtgtattttttattgttggagttatttttttcgaaaatataagtcgtatctaatttaactattatataatctacatttttcaattcatttatgtttttcatggatttttcgatgacatgtgtctaattagaatacaactcgaaataacatattccctctatccaaaaatataataatttcactatgaatcgggactaatacttgttcagaattatagttaaaagttagaatgtagtacatgaaatagcatagtacatgtgtattattattcattatggttttactatatttttattgttttgttgttatttggttgtcacgcaaatgtcaaaagtatgtatatctttaaagttagaagagtattttcttatatgtggatttaatggtttcaccggttaaatgttatggatctacagatttaaatgcaaattaataggtaattgttttctttataatatttttttaaaaaattaaaatattagatagaatataggaaggtgagagagaggattattggacgatggaggaagtgtgcgtgctcatgtgcgtgcacggggtgttcggagggattagtatgcttttgaactaatctaaataggaaaaaaaaaagatgtgcaaacgggagtacataagtacgtacatacgtttgtttttcttttttggcaggaatactatgcacatacttaattggtagtttctgatagatattttccggaatacttacgtgtattttttagtagatgtcaatgtatatagatctaattaaaattggtataaaatatcaggtccaccaatttaaatgaaaatcaacggcaagtatagatctaatctaacagtatgaaataacgggtctactaatttaaatgaaaatcgacggtgagaatagactgtgccacgtggtggactaagagcgtttaaagatagaacgtttaaagagtattgattggatactttatttttatattaattttcgtaaatttatagagtagtatattttatttttaaattgtagaaaatcctaatttatctaccatcgtttttttaatgcactacgtatctatgtttactttttttttattacgcagcttcttttcctgttgtacgtaattacggaatactttttgattggatacgtatacggagtttttgtttggtttcccggcccacagtaaacatgagaaaagtattagtttctttaagaaaataatacatccaatctaatggtctaaaatatcgggtccaccaatttaagtgaaaatcaacggtgagattaaacaatgctatatggcggtctaggagcgtttttaggagcgccacgtggcggcttaggagcgtttgtaggaagtttaatggacttttagtatataatagatagataatagaagatataatctaatggtttaaaaaagtgggtccaccgaattaaatgaaaatcaaggttggatgtttttctattttctcaaaatttgtaagtttttctcttatttattagagcgtcacatgatagcttaggagcgtttgttggtgtaccacgtggcggtttgaactaataggattaaacgtgattgactcactaagtacgaaattaccatttttaaataacgtttatgatgttaggccattcatcttctttaaaatccatgcggtttttttcttacgagggtatcacagcacatctcacattagagaaatgttttagttaggtgaatagtaggagtacttatgtagacaggatttattttagctatttccctgatgaatagtactactattgtatttatatgtacacatgattttttttatttgggggcattattttctaatagatatgatctaatgatacaaaataatccaccgatttaagtgaaaatcgagggttggatgtttttttttaaaatttgtagggtttactattataattacataatttttatacttagataaatgatcaaatatatgctgaaatgtcaatagcataaaaaaacagatcatgtgatataaatatattgtagggtattacagatgaaaataaaacataaaaggaaaaaataggaagtaaaaaaaggatgggtacgtacgtaacctgcttactaactggatgtggccgcaggcgtacatacatgtggtagatgggagggggaactaacttttttttaatctaatctaatccaatggtctaaaataatggacccactggtttaagtgaaaatcgacggctagatgtttctaatatattaaaatgccacgtggcagcatatgagtttttaggagtcccacgtggcggcttgagagcgtttgtaggaagcttaatggacgtttagtatataatagattagcccggattaattagaatttaagctctactgttattccatgtcttagcttgattttactaggtccttacttagcagtagaagatcttaatgatttagcctatgcattaactagactgaacttgtccgaaattaaaaaaaggataaactaaaccgaaattcccaaattaagaagaggcgggtaaactagattgaaactcccaaaattgggaagacgcaataaacctgattgaaatgtctccaaatattccaaaactgaataactctaattcagttaaacactaaatcctaaaaaatttcccaaatcagaatcaaaacatcacgaatcaaggcagtgtgggttttcatcaggaagtggcatcacgcccatgttgtgaggtggagcaatacacttgtccactcaaaaaaacacacacttagaaacaatacactcgtcttaaaaacaacacccagatgagaagtgtttacaatcaattccggctagtctaaccgccgcctatgggccagtatgacaggcgcgtggggccggtctgaccggtggtgtgtggcaggtcagatcgtcaaagtccgaattcgggttgaatttgccgggtctcgagtttccttgcatggaaaggtaccttttgagttctaattgatctctacccaaaatttgacgtggatgaagatctgtagtaggcaagaccggccaatccctatatgagggcctaggccggttaaatggagacaatctactttcaacaaaattagccaatggaatcgctttttcaataagcaattactttttcgcttcatttagcctagttttgttcatctttgtcgatttgccgtaaattgtctgccttcgccacgagtgtgcgattatccatttgtagttttgtcccgtaaactttacattcgcccacgagacgggtagttatcttcaaatcgatttaactcggctttgaggctgatttgatctctaaatcggctccgctagctagtttagtcttacaaaactcatcttgatttagcttttactagatcagggtggctggtgactccatatcaccgcaaagctttaggtgtcccgatcgtgattatcttcttgccaaacaaattgccaacataatttttggtgattttgctggggttgactatattaacaatttaacatcaggacctaatggaaaatggaattttccatggtaattttatttttgtcggcaaaccctgttgatccacccacaaggaaataatttctgacggttttagacctgcaaggtaactatcaagtgtggtagtgatggaaggctttgggaaactcggtatactcactgtcgggaatcgtggaacgaattgaagatttcaatctttattacttactacccccgtcccataaaaattacatttcttgctaatttaggacaaaataatagaattagaaatgaccacaataaccttatttaatgaacccactacatgcacacactccatatatacaaataattaaaaggaagtttgagagaattaacctatataattagcatacttaataaaattacaagcattagcagcctaaattatgtgagatggaaggaaacttatatagatgaatcaattggttgggccccacatggctagaaatacaatttttgtgggacaaagccttggagctagaaatacaatttttatgggacggagggagtacgtgcatctgctggaagaggccaaaatcaaggaaatcgtgctggcaagaagttaccagcatatcaggttgggctagaatttggcgccggcggcccatggttggtatataagcaattcttgctcaaattgttagttttatacactcgcttttgtatgcattcttcttttctagttgtaattcttctcctttactagcaattacataatgggaagagtttcactagaaatgaagttacacccaacctctacttctaccggtgggatgcacacggcctagaaaagaaaaataaaaacctaagacattgatgcatatcattctcttcccacaactcaaacccaaccaagacaaggacataaagtataatgccaatctctgggaactgtttgtcccatcatttttcattttctttatttgtcgtataaactacttggactgtttgagaggagaggaaaagagaagaattagaagatattaattaagtattaattattttaaatttcaaaaatagattaatctgatttttaaagcaaccttcatatagaagttttttacaaaaacgtaccgtttagtagtttgaaaaacgtgcgcgcggaacacgagactcaatctcccctatctcccctgaacagggaacgaacgatgttgtgtctcttaggacagaagacaaatatgtaaatcttttctattatataaaaaatatgatggacacgtaatcttccaagaaagatcaattttttggctgcatgtcagccactaaatcaccaatagagtaggttgtgcatttgctagtatgtcaacatagctccgtattccttcacactcgatgtttcaacagaaacataatgtggaacagggaagttactgtttgcaaggcacgaaagcttatgcaatgttgttcactgtgatgaacactatctgcaataatcagagcaagcatggagagcagcctgaccatgctatatacttattgagtgatcagtgatgcaatctagtgtattggaaattggagtaagtaccaaggattgggaacatgggagatcagattttgtcacaagggtacggctcattgtgtatctctctcggaggggtgacggcggcgcagcgcaaggcttcatatccggtggtgccgtgaccggatccagcaccccctggctcaatggggcgtggaggaggctgagcggcggcgcgcatgctggtggccggtgccgaggaggccggagtcagcacagcggagttggccctcgtgcggccagattgggaaggggcaacggtgaagcttgcagcaagcgggcggctttgacggcgctacttctcgtgacgatggcagagctcatggtgatagcggccggttggaggcgtggggtggagtggggtagcgctcccatggccggtggtggaggaggacaattatgaaggctgcacgaagcgtggggtgtgcgacggcagggaggccagcaaggagcacggcgccgtggcttgtagctggcgtgcgcagcacggaggttgaagcggtgtgacagccgtgggtgggccggtacggtgcgccggcgaggctaccgtggtgggagaatggaggcgatgctctaccttgtattttttttctttcgttaccttggatttaagttagtctctaagaagaagaaatccaagctattctcgagctcaagtgctagaggctgaacttgcgagggaaaaagaagaagcggcagaacttcgcggtcacattgctatccaagataagaacgtgcatgcctcggagttgaaggcagaagagtctcaattaatagcgaaggaaacaagtggctcagattgtatacttgtagaacaggacataggaaacccgtgatctccttggttcattgctcttcgactgaaacggtcaatgaatcttctacttccctcattacgttcaaaaactcctgttagctcatatatatattttccaatgctattaagttcgactcaattctgtctttgggaacatgtgacattttggtttggcatgtaatactagtactttgctgccctcgagcagttgtcaactttcttaagtgaagtccatttagcaaccaacgcatcatctggtgataacagatataatttaattttgtcatacatagtacgatgatattcattccaaacaagaacatctggtgctcgtttatctggtgacatttccgttcattaatggaacgattcaacagattgtctggtgaacaaaatcgagttgcgcttggcccaatacgtgttggacctaaaatgggcctctagtatttcttgatgacccaaatcttcaaaatggtccataaaatgggcctccaattcaatccaggccatgtcacaatgttccgccacgtaggttccacgtgatcgaaaaggagtaaccatgtcaacaccggtcacatcgcaatggtcaaccacgtaggaaccatgtcatcacactatccatgcggtgccatgacatcaactagttcatgacgatttggacaatcgcaaacactatgacgacgatgcctattcttcatgaacatctgtgatctgtggctcggattttgtcgagtagttaatcccagatggagcttctgcaacgacgccctttcaacacaaggttgtcacttaacacgacttgtgatggaatttcgctagtttctgatgaaagtgtcacaacaaggatggacagaaatgttgtaatgtagaatatcaccctttaccaaatagaactaggcatcccaaattcgatgtaggcagacaagaccttaccacgcccgaatcgaactacagtccttcctaaaatgggcagaattctttccttatctatacttgggattaccttcttgtatagaagtaggtatgtggtattccccgtcatgaaagctctacgggtatacaaggtatgccatattcataacacagatacaacctcaacagttcttcgagtccttccgaccagaatgtaggatcgaacacaagaaaccaagcctactagaggggggtgaatggtagggaaaaccaaaaacccaaaaacttttagcggaaataaaagttaccctcaaatcgatggaaatctcgacttagtcctgtcgccgccggtcggattgtttgcacgccgccaatctaaccaccgccttgtcgctggttgaaccgtcggtatgtcaccggttagaccgccgaacttgatgaaacacaaatctaagaactctcaaaatagatgacaactttattgcttctctctgtgtttacaaagtgcaacaacatcactccttacaaaaatatcgagtaaactcgaaaccctaactaaactatcaactctacgctctgaaaaacgataccgggaggccacccctccctctctatttataccgaaaaaacctcctactcaaagtaggagaacaactcctagtcacactaggactctatccaaattacaatctcctaaagcctgcagcctcacaaccgactacagccaatccgtgtcctagccaacccgacatggacacatgtccgtctcatacgaagtcctggtcagcctcggtctcctgccatggcgccgctcctgccttggactctccgagccaaaacacatgtatatgcatacatgcatccatgtactgccaaccactacagtacacttgcatgcattgatcaataccacacatatgcatgctacggtaccacgtgtactatagcaccatatactcttcctcaatttctcactccagtctccttcgcgaataccggcacttgcacgcatacctcgtgaagcccgttgcgaagatctctcccacacgatgtccatccaccgcgtgccatctcgtatccaacttcgtcacccggtatctttgaccatctggacctcaactcctccctgagtttagtcccgatccacaccgttgaccgaagttgacctccaagaatcctgactctagtcaccttctcacatggtatccctaccgcactagacctctgtttctccctgaacatagtcccagtcctcaccattgactaaggctgacctcaagtcacctgcacacaatcagacaaaacaaccgtttctgggcacagatatcacaacctgacccacattagtcatacgcactcacaccaacatccacacatactttcaaaccaattcgttgattaaatcatttgcatagccaattgttcatcacaaatattaatcatgacaatgatttcacacagaatgtgtcgcctgcaaggtttatcctctgttttgtcaacaaccggatgtcttggaatggcgtgcatttgttggcaggcactatgatcggcgtgcatcaacgcatgatctggtgtatctggtgaaggctagtacatgcctaactctgttgtcgcgcaaaatgttaaggaattcctatagcgtgttttggatttagtagtaattttgcgttgatacactgacatgtgactgtgccacaaactatagatacagaaatggattgttggcgaaacaatgtgcgtaacaataaatagaacacaatattaccaattggctgaaaaacaaactactccctccgtttcacaatgtaagtcattgtagcatttttcacgttcatattgaatttaatcaatcaataattttctgactgcacgcaagctagttgaataacaaagatatgttttgctgtatgtggtgcaggcatacatctttatcctttcagtttttttcttttttttttgcgatgatctttatacttttagaccctctgtgcaagaataaaaggcacccacaattttagataaatcaacagttgtagactttgactaataattacacaaacaatatatatgtttattgatattcatatgacatcattatatttgtatttggaagtattctcatatgatgtcaattttataggctgtcaaataaacttatgcgtcttacattttgggacggatggagtattcatttaaccaagcagccatctcctctttgaatatatccattgcaggccgtggcaacaacatggagatgacgattgacttctcatttttttcattcttgaacctgaattggtaacttgtcgtatctggtagattaacagttggtataccgcccccaattcgcttagcacatccaatatctaaagtgtcctgcccaatccattttatatcgcatgtttcaaatattctctgtactttgatatacggtttctcataccataatggcatcacatccaccatcaattgcatattctcttctgtccttatcttgtgtttagccttgcggacaagttcaattgtgtgttcaagtgggtttgtgcacaactctttgactgttgtctcaactatagggtacattagcccattgccatagtatcccaaaggaagttttctccatctcccccgcgcatttatgattatctttaagagtacattttgccaaggcttatagcctagtgccacggtgcggcaccgccacaaaactgcagttagtaactcaaaacttgtgattgtttttgtgagattcaaagggacattacgccataggtacgacatctgtttttcagagatggtgaagtattcagaaaccatattttcggtgggcatagtcaccataatgtcatcacaagtggcgctctccagttcatcaaataatgtttggtgttcttcaatgatgtggggtgataaacttgttgccacaaagagctccctgtcccaaacaggcagtaccgttggctttgcctcaccacgtgctatatcaaatattgcttttaataactgaaatatgccggatccatcagctatgcaatgacaatggtaggttccaaggacaaatccaccgcatttgagttgagtgatctagcaaagaaaaaaaattctaattaaaaagatagaaagaagataatgactttgtattagtttaaatgattctaaactagatataactctattattacaacaatacgtgctagaaactattaagaaggcgactcatgctacataggtattataatattaaaaatgaattaacttaattaggaaggaatgtggagggaggaagagaagagagaaggtggtggggccataaaaataagaaaatatctgagttacagtaaatcgaagatatctctattgtacggattaactgtagtgtttagtgattagtgtagatgacatggccaccggtaataggcagcagtgggctctcttattaaccttctgtaatccacctgacccatttctcgaacatccatatataaatgcaagtaaccgtttcgatttttctttttgacattcaggtaatcgtttaatgaagttacagcacacgtgtatgttgtttgtaccgtgtatttacagtgcaaaagtgttctttttacattgtaacttttagctaggtttttaattaaggtgcaagtgatgaagtgaataaaaatttttagattaaggccaaagtgcacactgataaacacatgcaggtcgttcaaattatgacgtctagattgtaacgctggatttaatccaacagctagcatttccatttttgtataccggcggggggcgcggccatatggttccgttttctgatatatctatttgtctttgttggcacattatgtcacccttggaattaagtagttaattcttggtctcaaactgtgtggccttaatcttaatatatatcaggaaaaaaaaatagcgagaaaccttgatttgaggggtttatgcatcaaagagacagagataggtttattttgtgacttgtgaggagtgaccatccaacacatgctgggttttttacctgcatgaagaacaatggcctcccaacgatgactttggcatctccaacatcgcaaaggaactcatcagatccacggaaaagcggcatcggcggctcgcccatgtcctcgatccgaacgtccgcctccgcctccacgaacaccaccccttcgccggtgcactccacggagagcttcccgttgggcagttctcgcaggcgtccggccatcgggtagtagtacacgagggcctcggcgagggccgccttgatggcgtccgccgggcggcggcggtgatggtggtggccgtcgtcatcatcgaccgcacggaagaactcgaggcatggctggatgtagcgcagaaaccagtcgttgtctaggtcggacagcggcttggtatctctcggcgtcgctcgcgccggtgctaccagctccggattcctcctacgcaccacgaacgaatcctgcttcatggttgttattctatgtatgtacgtttggatatataggtgatatgatgcaaaagttaaacacaaaatgatgctcgagttctgaaaacaaatatgcatggaagggtcgaatttatacagactcttgggaatggatcgattggtacgggtcggagctgcagaagcaaatcgtaccaccacagaaaaatggcgaatcaatatttaatgcacaaatgcagaaagaccatagaatatttattattatgtgatcatatgacacatatactaacatgatatcatatcttactacaaagttataacccactaattttaaagctcaacatgccacatcatcatccactagcaataattacatataaaacttatgcaaacatgcaacatcatctataatttattgaattttacaaatcaacatccaatcatcttccttcacattatttttcataatatttttaacacatatatatatcaatcatttttataatacttaagatgcattcatccatataatcaaagtgcacgatatcatatttcatcaataatttcatactgaatttactaaatttatttctctcttgacatagtttggcaaaccagttctatttttctacttgtagttaataactaatataatttatacttttagctcgattattaaaaaaatatattaaaagttacttagtaatttctgcagcaaagcacgagaatcacctagtatattagtgaataacgtaccatagttttctgttggagttaaaataatatttttttcatctcaattggggtcaaaataatatttctgtcattctttaaattaaggaaaaaaaacactccataggctgactacctaaagaactgctcacactaacgaatttttacaggtattttcttaatagaattgtcaacaataattgatgaattcaaaattcattctttaaaatagatctcacaatcactagtacagaactcatctgtgacggcccctcacatgccttggttttgcgggccgtcacaacgaagtcatctcagacgggcccaaaaagaggccgacaaagatatactcgcacatacatgttagatatgcataaaaatcgagcccatcacggatgacacctatcggtgatgggccccaacttgaggctcgccaaagataaccgatgatatctttatcgggcactaacagaagcccgtcactgatgttcatcatccgtgatgggctctaacttgaggcccgtttgagataactattaggcccatcaccgataaatgtcatccatgatgggctccatgttggggcccgattgagataagtattaggccattacagatatttattgcacaatataaagtgcacgtcctacgctgccaccagcggccaccttccccgagccctcgtgccgccgcccctgtctggcagcccagcgtcgtcgttcattgagcccggcgccgtccccaagcccgcatcggccgccgtcgacctactccacgccctcccccgccgtccttaccgccgccgcatcaacgttccccaccgtgcccgagcccgccatcctccacaaacctcctccatgacatccccaagccaaccacaatcctccaccgatctcctccacactgtgcccaagccggtcgttgtcctccaccgacctcctccacgttgtcctccgccgccctgggcccgtcgccgtgtcggccgccgtccccgagcatgcccgccactgacgaccttccccgagcacgcccgccgcctcgacctcctccttcaccggttagaaatttgttctaatttacaactcggttttataggttttgatgcttaacacttgaagatgttaatgtgaattatgtgaataatggatatgtattccattggatatgtgaaatatgagaataatggatgtgtgtgtgaatggatgtgtgaaatatgtgaataattgtatatgaatggggatgctgggatattatgaaatatatttgtttatgtaattttgcactgggcatggctagcaaaggactgaggctagccaaaaaacagaatttatatttttttgggggggaaatactcatcggtgatgggctttaactgcagcccgtcacggatgacctcatcggtgacgggcttaagttaaagcccaattgaattgagtcatctgtgacgtgctttagtttgggcccgtttgagattgtgctcatccatgacgggcgataattgaggcccgattgagatagggtcatccatgacgggcccttgtttgactggttgtctaggtcaaatctatcggtgacgtgctttagttgaggcccgattgagataacttcatccgtgatggtcgtatgcccgatagatatgacttctcacatcagtgacctttacgtcgtgacgggcaccatacccgacatagatggagattgctgcccgattgagatgtgggtgaccattgtagtgaatttgtttgaggggacaccccaatgggaacagtgatgcttgttatttttctaggaatttgtttgagaggtatttgagcattttgtaatcagatttgaatttaaattttgatttgaactctaggagaggagtggggacttttggtgagaatgaattgtaggactttcaagatatcaaaacaaagaaggatttttaggaagaattatagaggaatttcaaattgcaaaatttgaatttcaggatagtatatttttgtgctagagatttttggctgaaaggaggattttggagatatttcggcacttagatccttaagcacctccgaagaatcaaaatttggaaaataggctttttattcaaaataggtattaacagcgcgagaaaaatcaagggttacactattgtatgtcatcatattatatttttttgagtgaaatgcaccgttagtaccttaacttgcgaggtgggtgcaatttagtcacccatcttgtaaaatgctcaaacaagtcattcatcttgttttgggggtgcaaatcacataaaacttgtgttgtatggagtgttcgcaatgaagttatatgctatgttaatttgttttccaaacatggtcacacgattcataaataatctaacgtgcaatattaccggtagtaaaatccatttaaagatgaattttgttattgattgccaaacacaatatggtcgtgttaattgaaagctggagtagtagcatatacatgaaaatataagtgttaatttgtaattttaatgcttatcctgcccacattggtaaaaaatgcatgatgctaggtcaatatggactccaatttgaaaacaagccatctagagacctttagtttatcattcatgatgaaaaaaattaaagatggtgcttcgagggtatccatgggtctcgtgggtgtaggggggactcgagtcccccctgcacccacgttggatccacccctgcgtgtgaaaatgtatttggtaacatttgcaccatcgaagcaatacgagtgacttgtttgagcaatttgcaagatgagtgattaaattgcacccacctcgcaagttgtgataccaccggtgtattttactcttcttttattttctacagtatgatataagtgattgcatgcaggtcgtagctaatgcgtactacaacacaagtctatgccagggtttaaattttcgttttcactatttctatcggtccgaaatattttgaatttttgaacaattttttttcaaagtcataaacatttgaaagagaaccaaaaaacatttggcccaaatcatttattatcgcagggtccgatagaaccaaaatttcaaaacttgcaattcgaaattttgaaccctgctggtctagaccacgatctagatgcaacaaacgcagtgctatatagcaacaataattgtcttggactgatccttaccaacaataattatatactagaaaatcgagcgtgccagttggcacgccaacttatttatagcccccatgtgtattacacttatatcgatttatttaattttctagaaatatataagatatcatcatggtagtaaaatatttgtttcgattgcatttatctaggtattttaacctccaagcaatgttcttggtgctacttacttctgtatcattttccatagaaaacgttatgcttgaaaaatattatcatgacattacaaatttaaattgacgatcaaaatttggcacttttgctagatttttgtgagtgaaagattttagaattatcaaactttaatagtagaggtaagttttgatagattgttatattgctaaattttagtaaagcgccaaaacttggttaggttaatttggcaatgaagtgagaaaacccgtagaatgcggtggaaactcttgttagcagcgagtacgatgttctatgctctccccatcttctcatttctcattttccaaactcatctcatactctcacgttttgcacatattcgcttccccacagttaaaccgtggatttgtttttttaaaaaaaatacatgaatgttgttgtaaaaatgtattaatccatttttaacctttttagctaatgattaattaatcgtgcgctaataagctattccgtttcccatgtaggggtaataggttcctgacctggccctcctcccgaacccagatgcgtcactaacttgtggggtttatatcaataattaatatattttgtttacaatgacataatcaatttaaattgagatagcatatattgtttcatttggaactgctctcttatcaatggaaaatatggcctcacgtccttcagattgattgaatcaatcaatgttccagctagattgcaatgaacatcatattagtattcatacattttacattgttcagcatgtacccctattggctagttcgtagcttcatcttctttccgattggttcttctacacttagtcctgtttagatccaacgctaaaattttgcaccccatcacatcaaacgtttgaacatctgcgtgaagtattaaatataggctaaaaaataactgattgcacagattgcgactaatttgtgagacgaatcttttaagcctagttgcttcatgatttgacaaagtgatgctacagtaaatatttactaatttaaggactaattaaacttaataaattcgtctcacgatttactgatggattattcgatgtgacgtccaaaaattaggggcctccaaaatatgtatactatggtaccaaatctgataggctactttgtgcattgagaagatgctgctagatgagattgttattgacactatcatcactgattttgcatctagaactgttagaaaaattgttttaaatgatttagagatatttcttttagtattttaaacttattagtgtgaaattcgttaatgacaatgagtttttaaatattatcttgtatttttatggtgaataggggccttcattttttgttctgcactgggccaccaaaaacgtcaggaccggccctggatatatatgaatccacacttgaaagagaaacatagatactatatgtagaaaatgatatgtcaactactgcatagtaattgtattattgtaagcacaagttaattcgattaacacaataatggacccaaataactgataattaagaagaacgaacgttgcttgtgcttgatacagtgagtcagtgaccctaacaatctaacatgcatgtacgtactgttgtttgttgagagtgagacacacacgtctgattaaactagtagcaaagcaagtatcacgaggaccatatagaattataaatcgtaatagctatcaaactttctttctgtaaaaaaagaaagacattaattatttggagatagcaactgctgagtcagcgatgtgatctggtacgatcaaagatgctcttgctatagaagtacagcgacatgatttgggcatggggtgcgcgcggtggatcgaccgcgcgcggcagtgcggaaccgactggcgcttatcgatgacataacacgaattcgtcggcataagcagatagggtgctgagagcatcatcaacataatgtcaaaataaatctcaatgtaaaaacattaggatgctttttgaaaaaaaaaattaagggacttgttatacaccattcgataaaagcttgaaaaactttcaaatccttgagagaaatgtccaggggtcttccggttagctccacaaggtggtgggctagacgacctgggttcaaagcgcctcacccattctaattatttgatattaggtcctttcctaatattctagtttttttttttgaaaaactttcaaatcctatcttactataaagttatcctctactaactacttaaccttagcatgcaaagataccacatcatcatccactaattaacaatatgcaacatcatcatccactaacaatcatcacatttaaacatcatgcaaacatgctatatctttatagtttttataatttatgagtttttcaaatacaaacatgttaaattatcatccaacatcattataatatttcaatgtatatctttattatgttttatgatattctatttacttatatagttcaccctcacttagttagtgtttaaatgattaatctatggtcctaattatctttctcctttttttcctctaattaagtcatatcacatcaattgttttagcctttagatgattaatctacggtccaaactatctccctacctttctttttccataaagttatatcaccttactttttacgtttgaatcaccattctacatactccctcctttcctaaatgtttaacgccgttgacttttttaaatatgtttgaccgttcgtcttattcaaaaacttttgtgaaatatgtaaaactatatgtatacataaaattatatttaacaataaatcaaatgataggaaaaaaattaataattacttaaattttttgaataagacgaacggtcaaacatatttaaaaaagtcaacggcgtcaaacatttagagatggagggagttctatttaaatttaaattatcataaaccatattaatttacttaatctgatgttatctagctatcttacacattattttttttattgttatcatactaacttcccgcagcaatgcgcggggtttcacctagtataatagtagtgtagttacaatatatataacttgtatttaactcttatgtatctgttatcgaaagacaactgtgtcacgtaaaagatgtggttcactcagtgagttgatggaatagtaaaagcaatatattaattggtaaaatttttttggatccctcattatatggccctaagaggctatttatagtgttcgtacaggctcatacccttatgatagagacattagtgtgggtacacaatgttttttgtatttatgggccatcaggtgaactctttgggctggcccattaatggcgaaaggcccccatgggccacagggcttcccaagactatagctgaaggccccttctattcgggcgaaggcctcttgcttcatcttatggccttcgcccttagtggtgacttggccgagtggtgagcttgggggcaaacccttcggttttcgtcgttcggcttcgcccaaaacacttcgccctatggcttcgccacagggttgtgagcttggggacaaacccttcggtcttcattgccggcttcgcccaggcgcttcgccccgggcgcaccccttggactcagtcgatgcccaatggattcggtggtttcggcaggtccggtcgaaagccctcatgacatgcctccaacagtaaccaacaagaaaatcagtgtgggtggatggctggtgtggcacaccagtactctacgcatggagagagttcctcggatgtaactttttcaactctaatgtggtcactaacatcgcaattgcactactggagaaacccaaattggtgtcggttgggaatcggtcatacgtgccggttatgttattataaccgataccttcagctagaattggtgccggttacgttattataactgttatcttcagctggaataggtgtcggttattaccttataacaggcacctattttaacttataggctctagttatattgttataacgggcaattgtcggaatataagaacttttaggatttgacatgtgtattaaaaagtagttaggattaaataagcaaaggttgtgaatggttgagaagtggagataggtaagaaaattaaatggtggagtaaagggttgtttgcacaaccttaaactctatatataagtatccgccgtcacctttagggtttgggttttgcttagattattctgttaagaacagtttcgccgttagatcgatttgtaagaccccatctatgagcttaatcattcatctgcaatttgattgtattcttccttgttcttgtttgtgttcttcgaatcgtaaaacagagattagccttctcggtgaggtcaaccacgtttcgacacggttaataactagaggagacgtggtgttgcggttccgggggttaagagtgtattcgttcaacagtcggatcgatttgtgtcgcgactccacccaatcgactatctatcagaacctttcggaagatcgggaaccctagtccacatcacatatgttcatgaaaatagccatcgccatagcttttgtgacggcccaaatcgtcatgaccagttaatgtcgtgccaccgtgtggataatgtgatgacatggatcatacgtggttgaccattgtgatgtggctggtgctgccttttcgatgatgtggaacctacgtggcagaacattgtgacatggcatggattgaattggaggcgtattttacagcccatttcgaagatttgggtcatcaagaaatactagagtcccattttaggcccaagacgtattgggccaagtgcaactcggtttcttcagtagacaatctgttgagggagctcctcttatgcgcgtacgcgccaggaatagtgcgcggtgcgcgttttgacagtcctaagagcgctaagagctgttagcgctaacttttttttcggataaaaaatcgtcacgcgtctttcttcctatttttaagttgactgaaacaaacttttaattccagatttgaactcagatttaaaaatttcaagtcacgatttgaatactttcaacttagatttaaaaaaatttcatgaaagttttaaaattttcataaattttttttaaatttgagttgaaagttttaaatcttcatgaaagttttcaaatccaagttgaaagttttcaagtctaaattgaaagttttcaaatcagagttgaaagttttaaaatctgaattgaaagttttcaaatccaagttgaaagttttcaagtatgaattgagagtttttaaatccgagttgaaagtttttaagtttgaattgaaagttttcaaatctgagttgaatgtttttaaaatctcgacttgaaagttttcaaatctgagttaaaatttcaaaaaaatcttgatttgaaagttttaaatattgacatctacttgcgaaaaaagggaaagcgaaaaaaattgcgaaaaaaaacgaaagaaaaaaaaatcgggcggggaggacgattagcgcttctcgaattactgtagcgcatgattaactctaatcatcgtaattaacgctaatcgccgtgattagtaatgggatcagcgcgacggattcgcttggcagtcaacacgtggcagtgcgcgcgagttactgtatcggcgcgtacgcgcgaattagcattcgcgatctgttgaatcattccattaacgaacgacaaagtcactggataaacgagcacctgatgttcatcttgtctggaattaatatcatcgtacaatgtatgataaattacatttgttattaccagattatccggtggttgctaaattattagaatccttcaagatagctggaaatagcgctccctcctgcatttggcactggcatggatagcgcccggaatcgacacgtcacacgctgggagggatttggcgagcggccctgcctccgtgtggatcgcatttgttagaaaagtccttggtttagttgcttatttgttagagatccctggtcttcactttgtatttaagcgttcttacgaagaggtcctcggaaaactgtaaaattctacactaagaagcagaaaaccaggaaaaaggattgcgctgtaaaaaatagaaaacgaggggatttttttgaaaaacggcgcaatctaatccttccccaatctctggagtctggacgccactatccttccccaatttctcgcctctcgcggccctgtcaaaaaaaaaaaaataaatcgcctctttgttttcctcccgtcgctatcctcccttgctctcgccgctgcgcctggcagtgaggaggacgggaccagtggatgcagcggccccggccttgcgcctcgcttcgccgtcatcgtctctgcggcgtgctcctaccatcgccatcctcctcttgctcccgccgcggcgcccaccaagcactcaggcaggatgggataccgtctgccacctgctgcctggcgccgccctcctttccgttttcctctgcatcctcttcctccgtgtgcggcaacagcggcgggcgtccacggcgacgccgtcgacgaggcggggaaacgctaggcacggccttctcttgccttcttgccttggtgaacttggtctatgggtatagcgtgcctgacttgtggccctcctgcttgctttttcttttctacccaccatacaataggtttatgttttgatggatggttttaatgtcagtttttttttgtcttctttggtgtgtctctgttatgtgggtctatgcatcctctctattgtttaatatcgtgtgatttgttcatcggtgctagccgtctccttctcggcgtggaagaccgcgccaaccgtgggaggcagcttgccagggcgctgctcgctcagtggatgtgcgcttagtgggtgcggtgcaatgtgattcgtttatttctctgccctatgtcacagcgctgtgggtgctcatcgtccatgcaccctctgtctctgcactgtggtccagccctgtttgtttcgtgtgattggatcacgggtgttggtccatccagattatatgtgccatttggtttcactggattcttttggttggatggcatctctttgtttcactgcagggtgggatcatcttttatgggggccactacgccgatttcttattggtgggtttacattgtactacgtgaaaattgttttcctctttcgatgcaacctatggttgaggcttctttttttcttataacgccacaacgatacttctccctctttgcctttttcgctttgccatcgtcgctttccccgcctactcatctgttgtttcccgccatcgttttgcctgctttcccttcgatttcattcatcgatcatggctgggtaagatatctggtgatgatattatcttttattatgtgggtctttttcttcttctttacatctagctgattcctcattttatttacccgtgtgtttttgcttgcattgtttttaggggggaagatctgcacgggctgcaccgctgcttcaaaggatcgtgatcgtttttctttatcagttcaagagctgtcagtgtaacttggcaggtttgttttcttctcttttcgcaattgtagctctcattgatccttacaatttatttttttcattatactaactgaatcatcgctattttgtagctctcattcgcgtgcgtggtacctctctgcttttcttcttcgcttccagccttccacatcactgctcatctcgctattgttggtccatctttgttgttggttcatcgtgcatctttcatcgaaggtatttacttccttgctatttttttgtttattttgctcatttctttgttgtgctatacttattttcacccattgcgtgtcatgcgagtgatcgcttcgcattatatgtgtctgatgatgctttattatcttgcttatttgctcctatcaatttctgcatatgtgtgagctaaagcgattccatgctttatatggccttcttttttacatcaatatatttttgtgctctatgatagcttcgttgctactgtgtttttttttgtgtgtagctgattgtttcctttataaatgcactgtctttttttatgcttttcagtggccttgtgattgtagagattagacctattaatttttataacggtctatttgttcacttccgcttgtcatttcattgctcactgtccatgccttctatctaaactatcttttttcgttgatattttctttctatggtatgtatacccaaaatattcgctacagatgtcagaggaggctctcagtagggttcgtgctagccgagaaagacgagctgcgaatattttgacccgtcagcttgtaatgcatatacaacattcagtactaggaccgattcagcctaggcaagtagacgagcgcaaaagaaaatgttcacttatggatttcacacctcagttggctaagctgaataggcaaaggcgttgtttgctacgctcaaagatggagcctgtacctcctgtgcacgctgaaaatggtacccaattaatcttttcacgtattgattgtgtttcatgacgcacaatttttcataagatgttactgtcaaatctgttcattgcagctgccggtgtaaaaaccaatggtagttcatcacgcacgaataaggagtacatccagtcattaaagggttcgcgacctatgctaaatacaaaacatactgctatttattataaaaccagcttttaacagtcctaagtattttgctacagcctcatacccagggagatcgtactatggtccaccaacatatgagtgtccgtactgtggcgctgtcttctggtaccaggagagagtgaaaagcacctctgctgtttcacagcgaagaatagtttataacctctgctgcaagggcggtaaaatacaattgcctaagctgcgctcgcctcctgaaccacttgcgacattattaaactttaatggtgatgcacgatccaagagattcttaaggcaaatacaatcatacaattcgatgttcgctttcacttcactgggtgcaaccattgatagattgattaatactggcaatgcaccttatgtgttcaagattaatggtgttgtgcaccacagaattggcagtcttttgccatcaagtgggtcacctccaaaatttgctcaactatacatctatgatccacaaaatgagacacaaaatcgattaaatatttttggaaatgacagtgatgatgcagataaaccagaccctgaaattgttagtgcattgtcatccatgcttgataggcacaatagtcttgtccagacattcagatacgctagagagcgactttctcagcatggtgaccaaaagataactcttcgccttctaggctgcaatgctaaagatgacgtgcaatataatttaccgacgagtggtgaaattgctgccataatagtaggcgatttctgtgcaaaagagtacaagtttgatcttcttgtgtatgataatgatcgtggtttacatcaagtttcttcattgcatccatcatatatggctttgcaatatcctttattatttccatatggtgaacgtggatttcatctaggcattcattacaacaattatgatgggattggaagaaagtatgttacaatgcttgaattctttagatacgaaatgcactatagactaaatgaaccaaatcctttcacatgctatggccgactaagcgatcagagtgttgttgatgcctattcttcgatagaagctaatagattacaatttataattgatcatcaaaacgagttgcgtgctgaatctttagatggaatcgtagatgcaatcgataaaggtgtcactgatggcgattcagttggtaagcgcgttatacttcctgccagcttcactggaggaaggcgatatatggtaatgaactaccaagatgcaatggcaatatgccgtgtctatggctcgcctgatctatttgtcacatacacaagcaattctaagtggcaagaaatttatgatgcaatacgatttgagcctggacaacagccatcagatagacctgatatgatagttagggtgtttaacatgaaggtcagtgactttataactgacattagagaaggaaggactttcggtaaagttcttgcaggtattgttgactcctatttttgcatgcagttctatttaaatatgattctcattacttctcttaaactattccagtgctgtacaatgttgaattccaaaagcgtgggctgccacacatacactgtttggtctggcttgcagcgcccactgctgaaatatcgacatccatcatcgatggattcatttgtgctgaaatacctgactacgacactgatcggttaggatatgaattagttagtgaatttatgatgcatggcccctgtggaaatgcaaacaaaaattgcccttgcatgaaagataataaatgctcgaaaaattatcctaaggattttcaagatcaaacaataattgatgaatctggttttacgatatatagacgatgaaacgatggccgacatattatcaaaaatggaattccattggataacagatctgttgttccatataacatgaaattgcttaaaacatacgaggcacatataaatgttgagtggtgtaacaaatcaaacttgataaaatacctatttaaatacatcataaaaggacaagatcgtgctaggatatatttcgagacaactgctaaaacaggaaatgtgtcgccaaatcatgacttagctccacgcaatgaaatattggaatatatggatgctagattcctctccacatgtgaagcactacatcgatcatttgaatttgacatacattacagaatacctcctgtcgaacggttagttgtccatttgcctgaaaaaaactatgttagatacgaaaaaggctctgatttacgagcagtgcttaatagtcctgctgcgaagcgttcaatgctaactgaatggtttgaagctaataaaaaacatctgaaagcacgttcgctgacatactgtgaatttccaagagaatggtcatgggagccttcatctagaacatggcgtgaacgaacacctgctcctaaaattggtagaatttattatgtgcatccaactgctggtgaactctattacctacgaatgttactaatgatagttagaggtgcacaaagttatgctgatgtgcgcacacataatgacattgtttatgccacatatagagaggcatgcgaggcaagaggacttcttgaaggagatagtgaatggtaccttcttttcgatgaagcaattctatttgcgtcttcgcatcaacttagacaactttttgttactgttgttctttattgctctgttactaatgtgcgttcattgtttgataaatattggctctacatgacagacgatattcataataaagtaaaaaagacattggataatccacgctgcattgtcccacaggaacacttactcaacctactcttatccgagcttgctgtcgtgtttgggaacagtggtggttgcataaaagattttaacttgccacagccatctccacttcacacagctatattggaaatagactaatcgatgaagagcttacattcactcatcttttgatgtctttgcatgcaaattctttaatagcacagttaaatgctgaccagaaacaaatttttgatacgataatttctcgagtagttgcagatcagcctgggttttttttttgtgtctggccatggtagaattggtaagacctttctttggaatgctattattgcaaagctcagatcagaaaataaaattgtgctcgctgttgcttcatcaggagtagcatctttgttattaccaagaggtagaacggctcactctcgattcaaaataccaatcgacattgatgaaaacagtatttgcaatgtaaaacgaggaactatgctatctgaacttttgctagagactgcactaattaggagatgaggctccaatgacacataggcgttgttttgaggcactagatcgtacattacgtgatatcctttctgagacaagtcctcccaactctattataccttttggaggaaaacctgttgttctaggtggtgatttcagacaaatattacctgttgttcctaaaggttcacgtcatgctgttattaatgcatcaatcacaaactctgacctatggaaaaatgtttcgattttaactctgaacataaatatgagattacttaatccagatctgccagtacacaaaagaaatgaattgcgtgattttagtgaatggattttagccgttggtaatggtactgtgcctatgattgcaaaagaaggtgaagcttatccttcgtggttaactattcctgatgatttgctttttaaaactgatcatgacaagatagatgctattgttagagaaatatatcctaatttccttgcatcatacaaaaatcctgaatatctagcttctcgagccattctatgtcctaacaatgcaacggttgatgaaataaatgactatgttattagcttgctaccagcagatggaagaacttatttaagctgcgataccatatcaaagtgctctgaacaaattccagactttgacctgctgtacccccccgaattcctcaactcaataaatgctgctaattttcctacacataaacttgtgctgaaagagggagttgtcatcatgctgttgcgaaaccccaaccaatcaataggtctctgcaatggaacaaggctgttaatttctactttaggcgagagaattttgcagtgcatagtattgattggattgaacattggtgaaactgtttatatacccagaatcacactcagtacaacaaaacttaaatggccttttacattacagagaagacaattccctgttcgagtttgctattcaatgactattaataaaagccaaggccaaacactttagcaagttggtgtataccttagaaaaccagtttttacacatggtcaactctacgttgctatatcaagagcaaccagccgatcagggctgaagatattgattgagaatgatgatggatcatgtgggaatgaaacaagaaatgttgtttacactgagatactacctgctacgttcacagcggtgctgctctcaacattgctgcatactgtgtttcattttatttcctacgaaagctactataataatgcaaatatactcttgttgcaggctccgccgcttgatacgtagtgttttttgtcaacaagaacccccctgatgcttttgtacatacatttctaaataaatggatggacataggcactattgtatagtatatatttcctgcaatataaggctcttataatcttaagtaatgttctttctatcatcatttttcatcgctatatcattactccattttatatactgaaatgtttatgttctttgcagagtacaaatggcgcacgcgctcatttcacagctttaccctggggattcagacaaaaagattctcgcaagggtttctagactttggcattttcgtgatctgaatgatgatacaaacatcctgcatacagaccttgtcttacttgatgaagtggtacttatcaaatcactactcatgcctcttattatttgtgtacattagaataccaaacgtattactaaaatagtatatcatattcaaaatttgaagggcaatagcactcatgttcagatgtatcgaggcgcaattgaggttctgaaacctctcatccatgaagggaacgtctactacattgagtcgttcactgtcaaagatgcaaacagaacttatagaccagtttcaaatgacttcatgattttattcagtaaatggacaaccttagaagaatgcattgacatcccagctgatttccctgccataacattttcattgacacctttccaagaaatcccctctcttgttgataaaaacatattctatgttggtatgatatattactataatattttcatttatgtatctgtacattgccttataacactttgatctactctattttcatgtgcaaacagatattatgggcgtcattactgagatcagttccacatctactgtgcgtccaaggtcaagggatgctgatagtttaaaaagaacattgcagatctgtgatgcaaggttagttatgtaaaacagaataattttcatttaaataagcttcgcattatgttataaactaatatttacactaattatcatttaaatagcagttcgatgaagtgtccatctttcattttatattccaattataactacactaattttactgttaatgcaaaacacagcaactcaacactgcctgtcacactgtggggagatcgatcaactgcagaaaatatataaggatggccaaactaaaccccaggttgtcgtgtttgttggaacacttgtcagagattatgcagggataggtaaatttccctatgcatactaaattgctaattactatatattgcatgcaatgactacaatctgaatctctagctcattgtatacaggcttaacaataactggtagctcaccatgcaaatggtatatcaatctggacatacctgacgtgctcgaattgaaagaaaggtactattatcacctatttttttcatatattaggttcatttgcagtgctttaattctcgctggctctaaaacatagattaaaaactagccattgcttttctttacaggttcagtgtcaactttcagccaatcaaatgggttgaaaatgctgctcctgcattcaaccaagacactccagaggaaaaaaccattaaagaaattctaaaactaaatccgcacaaatataagatctattctactccatgattttttatatgcatttcatacttttgctttgttttgtataaccgacaattctctttctctacagcgagcatgttttattgtcaatgttactatcaagagcatacatgatgaaaactgctggtggtacaattcatgtgaccgatgctgcagaacttcaaagccatatggttctacctatagatgctctagctgttgttatataggaatgccagtgccaaggttagaaaaacaccgaacacaatattctacacatttatgaattcccagtacaaattgtaatgaccatatatattgtacacatacagatacaaagttgtgctcactgccacagacaatacttctgaagctgcatttgtcctcttcggacgaattgcacatcgcctaatacacagaccagtggagtctctaatcgaagaaaatccacctgactttatcctagctgagatccaagctcttgtagatcaagcctttgtatggaatgtcagcttcactaaacacacagttaaacggaatcaagaatccttacaggtcaatagcattgtatcatctggtgccccaaaacagcacttcctgcctatctcatcgtctgcttcaggaggcacctcaactatcgtaccactgagccctggcacttcactccaaacaccacccgcagcaagcgaaagcagtattgaataacagtcatcaaccagaggaaagcaaagtgcatctctacagccaagtctatcaacaccaacaaaatatgttgttagccctgcagcagatgacacaccaactagcaagtccaacccctcaggatccaccaaaaagaaatatgttgtcttagcatatcctatgcaatctcaaacaatgcagccttccattgatgataaggttagtattccaccagttatactgatattcagcctattttcagcactaccttacaagcaatctaatctcctacttaattttgcaaggccacaactgagccaaagagtggacagaaaactttggaacatccatctcttcctgcagctggaccgtctgaatctgaatctgaacataaggtactgtcacatctctttgcttccatataacatattagatactaacacatttatctatcttataagatcaaaggaaattttgtcaatacacctgatgatccacctattagcccttctgtgcctagcaaaagtgcaagcaaaaaaaggtacctatggacagcttgcctacagtgcatcagtgatagatgcttacaatattgctaatttaactgactgttataacctaatattacacaggaccaacactatagcttcagttccagctccacctgctaagaagctattcaaagaacattcccagcacacaaaggatcaaaggtaatcctcctatttcttgacagtacctaagcattttgacagccataatacaaaagcaatatatagctatagacaagctttaggcctctaattttttttttccatgcagtgaatgagatgcttgtgtccagccatccaacagatattttgggtgtttgtacaaaacctatgtccactgctagaagaaaggaggcatccaaaataaagctacaaagttaaaagcaagactcttttgctgaagacctacatcctaatattaatgtatataagtggtcatgctgctatcacctttgctagaacatatgctatgtatttactaatagaagtactgcctcctacatggaacattaggcaactatgacacatatctagctatcaaccctctatcctgccagctacataattgcaatgaaataaggtttgcaggccactgctatatgaaatttagcatgcacttctgccatcatgcttgcttcttaaaatttggtgtgcatcttcatttatctagacacataaatttgattgtttcatgcccacttgtgtttacttttaatccatgatctacagttcatccgtgctcaataccagaagaagataaggaagccaaagtaaatgttccatctttatgttttagtgctatgttcccccaaatttgcactgctcatgatttcatacttttactattgaaatttggttctgttgatcaatatgatgtattgttgatattctgcaaaaattcaattttcattttatatgtacatcatagatagaacaagatatatgccagtgatttaatgtacaaatatttagttaaaaatttcataatgcatctcagttagcattttaaattttaataggattgatcttctgttgttgaatgttctttctttcttctctggcaaatctgaaacaattattgcaatgcatcaacctaataagtctttcgtacaacaaaatagtatgctgaaattagtgtattataggatggtcgagcctagaaacttggaatctttatccccgcttataacgctttttatttttcatactacttcatttcatgatgtaaattggccctcataccttgcagaactattgacttatatacatcacaacagaacacttctttcctcactacactaaaaaattaattacaatagcaaattctcccaatcatataagtcaaaactaatcacagactgccatttttaatgccacgggtgccgcgcgcgaagcgcacgtcccacgctagtggacttcatttaagcaagatgacaactgctcgtgggcagcaaagtaccagtgttaccagccaaaccaaaatgtcacatgttctaaaaacagaattgagtcaaagttaatagtattgaaaaatacactactacgtgatattttcctggatgccactcccttttgttttcaagcggttcgtaagtggaaccgcatagaaaaataaggggaccgacgcggcgctgtcgcccacacgggaaaatcgattttcctatgcgggcctcctaatccgacattatcccatgcggtcgatttaagtggaccgcacatttttccgtgcgggctatttaagtagaccgcacaggaaaatacctccatcatttccctcccatccacttcaaatttttatatcctctctcttactttttccctttattctccctcaactacccccctctctctctaccttatctcttccccgagtcaactccctccacaccttccacttctcctccccctcccctcctccccttcccctctgtcaggccggcgaggcgacggccgagcgaggcggcgggccggcgcggcgagcgggcgaggcagtggccgggcgaggcggcgaacgggcgcggcagcaagctgggctcggcgacggctgggcgcggcggcgaacgggcgcggcggcgagcctcctcctggtggtcgtcctcgtggtacacgtcgaccgctgcctcccttcctgtgcggcggcgagtgagcgggcccccgcccggatccggcgggcggcgacgattttcatgttttttttatttttggtttctttggttccgtgcgggtgatataacaagaccgcacggataattgattatcccgtgcggtccggtcgcccgcatgtgaaaatgccgattttcccagacgcctggctgcagattggctagacatccgcactggataatcaaacacccgcatgggaaaatgagtattgtagtagtgatataggagctaacaggagtttgtgaacgtaatgagggaaacataagattcattgaccttttcagtcgcagagaagcgaacgaaggaaatcgcgggtttcttatgtgcggttctaaaagtatacgatctgagccagttgtttccttcgctattgagactcttccgccttcaactccaaggcatgcaccttcttatctggggtagcaatgtgatcgcgaagttctgcagcttcttctctttccctcacaagttcagcctctagcacttggactcgacaatagcttggatttcttcttcttatagactaacttcaataacggaagaaaaaaacagaaggtagtacatcgcctctgacctcccaccacggtagcgaatttttttatttttaatttttttattaaaatatttacaaaagtaattttgtgtttcaaaattttgcaaaagtagtcgcccgccgctctctgggagggcgatatttaaaaatcgccctctcagagggcattttcgtgacgtggctgaccaccgttagcgcacgcctaacggccgtctatagggggcctgccattttgcaggcggcccccttgccgcccttacggagggcggtttagtactgtgtggggggccgcctgcaaaagggcggtgaggaccctggtttttttgcaggcggcccccttgccgcccttacgaagggcggtttggtactgtgctgggtgcctccagctttaagagcagccccaggtgtttagctcggtgcatttagaaaatttagtaaatcatcacttttaaaattgtgaaacaagaaaaaaattattagaattgaatggtatgttgtttcggtggtttggagcccaacaaggggtgtttttacaccgaaatatttaattgttactgtgaaaagtacataaataatcgtttcgaagtcgaaggaggaatagtttcaaactacgtaaatataactattttgcacttaaaattttacgaaataggtattttacataaacctgatttttagcacttaaaattaggtaaagtatcgttttgaaacgaacaaagtacgtgcattttgacaaaattttaataattttatttttcatataaattggagggctatgagggggtttgttacctataaattgtaagttacgcataattctcgtgtatgttgaatcatgtacacaattgaaggtggaagttataaaaatatgagcagctacatataaattataaggatacaacgtatcgtggcgtcaaagaaactttagaaatcagaacgatacagtcacattaaattataattcgtgacgcatacaacagcacaacatagtaattaaatattataatgacaagatagcatggataaaagatacaaatttgtcggtcctgacaaatcgagcctgagcttatctaccgaccgcttccgcgtcgttcaacatgtattgcattttgatggtccttctctcgctggtactctacctgtgtttctgactcagttatcttttggccatcatatgtaggattgacattgtcgatccataaagtgaatgcgcacctccttggattgccctgagaaacaaacatagttattcagataggatagtaataataagcagattctacttaaatttggaatttgttatacgtacagcaaaattgtcatctacattagggtagacaaagtatctcctacaaattgtttgttctgcaaacgaggtagccacttggcagcgatctctacaaccacactttggacgctccgaccatttaggtaaacctaatggattgttcctccagtctaagcttgcaatttgtacctgacgttcgtactccatccatgcctgaatgaattgcgtggtcatctcaggttgcgttatcgtttgaccaatcgaagtaactctgaacatatcgatccattgtacgaattgacatttcctaacctcctcctatttgaaaatttgtgtaaatagaggtaagtgtatgaaagtagtgattagtggtacccaaaaaaaagatacttacgacgaaatcgtcgtcgtcaatgttaggacacacgaagcatctttgtcctcgagttcgttgtcttacggaccttatcacctgacaacggttaccacaacgacactctggacgttcccgccatgtggggaatcccagagggtttacttgccattctaaagcttccgcagcaatccgatgttcatgctcatccttccgcctgaggtagtccgatcttgattcactacgtgcatatggacgtgttccgtcgttttctgggttctccgtatctacccactcaatgtagttgcacaatgtacggtatgtctgcgtaagatgttatgatggagtagaaatcggttagcattttatgtgttcagtatagttaattgaacttgtaacgaattaatgatacctgatcaaggtttgcacattggaagaatctcctgccccgagtttctaccatgaggcttgacttaagtatgcatcgatccccacaagtgcataacggctggtcacaccatggtggaaaccaaccggcgaaaggatcgcttcgccaattgagacgctcaagaaatggagcttccattctctctagatgtgtgggaagatgaaagatgatatgaagagcttgtatacggcttgtctgttatatagggccgcaactagtgctataattggacttaattttgttcatctggcccacttgatgtgacaacacgcgcacgcgtgagcatcattcactttatctctgagaacaggcccgaaagatgatagtgacaactcgaactaccaaggtatatgtgtactgtggtttgctgcgctacctaaaggagccgatcttcacgcgccgaaagtttgttgtcgtatgcgtaagtagttttaatatgcagtgtattgatgacacgagcacatgcgagcagtaattatttcacgtgcggaatctgtggtgcaaagttgatcgtgacaactcgacgaaacgctttgtctataatggactggaccgtcacgcgccgaaagttaggcttcgtatgcatggaatagttgtagtagtggacatgtggaaggaacgaaatagtagagcgtcaaggcaatggtaccgtagtactgacagcaaaagtaatactggtctacacagcaaaagtaagccaaaagaaaagttcacacaaccactcaataggtggaccactactgccgaggcctcttaccccggtccctcctgccctgcgccctaacgtgtccctaggagtacgacagacggtccggtggtacggcacagcctgctcgatcctcctgcactggtgtgaccagtggctgctcctgggtgtgcgcctccggagctccgccaagctgtgaggacccaagtatctcctagtctggcgccccgtgcaagtcgtcgtcgtagaaccgggcagtaggacctgtgccaccggcgtgtgaggaagaggctccactagcaaagatccctcgcggctgcgtgtcaggacgagggatcggcgatctctgtgacgaactgttgcctccgacaaaggcgccggaaggcagacggggacctgcgcgtaaggtatttagttaggacgtagtcatgttaccgagaataaatcatatatacttgaactaacctctgggcggagcagtaccgtgcgaagaaccagctgtaggtcgcacaactccggtactaggggcgcgtggacatggtggtactggaccaggtggaggtaccgcgtccatggcgctgcgacaagagaagacgcgcatgacagcgcgcatcttctcctgcatccggtcgaaggtaatcctctgctcagcatcactcaagtgtagcccagtgtccaacctcactattatcgaggtaatatcggcgttcacagctcgtgccgcgtcggcctattcaagacataagacagcatgtcagtaggaaaataattgaaggaactgagtagaaacaattgccagaagtgagtagaagttcgacgtacccccatgaagtagtttcggtcacggtgcgtggggtacttgtccctgacagtggcaagttgcggctgtggtgcggctggagtgaaggtcacacggccacgagtgcgaggcaagtaccactgtaggtagtccctgtaggtgtcctctgagtgtggaacgaactcgtcgatcacctcgtctggggctaacacccagtcacccacgtactattgtacgcgtggtgcccatagtgtgtcgggtagctgtcctcggcgagtcaacctgtcataaccagaaacttagataactcgatgaatgaagttgtataacattcggtgttgtaacactttgtactcacgagtggtctgcagggaggacggtaggcgctgtgtttcccgagaagacctgcctcaagccaaactgcctcatcatacgctgggggcagtgaggctcgacgtagatgtcgaacaccatcggcaaggtcatgagccagtaggccatgtcacgtgtgcacaaggacgaaagtccaagcggtgctcttgctgtgacggcctcctccgtgtacggctcccagacaacgtcgttgggctagagacggtcgaactcgaacatgaactcagggtagctccgtctcacctgcacgtgggcgtaactgcgctgcaccattgaacaagggaaacaaggaaagacatgtcaggaatgaccgatgaatgtaataaatgacgaaatcaatagagttttcacttaccccacgtcgacaccagtacgtccccattgtggggccgtcctctggccactccgcgctgcgacctatcgtgtaggctatggggtccaccacaggccttcctatggcgaacctctctgctggccaaagctgaacgagcagtgggcaaccagcgaagatcgcccccgcgtcagtcttcgtgcacgcctcacagagggcacggtaggtggccgctagcactgcagatccccagctccactgtggcacgttctctagctcagtatccgcgatggcccgtgcgtagtggatcaaacccctatccacagcatgcccatgggtgttggtgaacatcacccaaccgaacagccagagcaggtatgcctcaagggcgcgtaggaccgagtactcatcggcgtccgggtggagcatctccgcctacaattaataaccaacagttagttcaaattaaaatattggtggaaatgaacataaaccagttcgaccagctgacttacagtgaactgaagcaaccaagccttcgtaggcccgactgtagtgtacgcgtgtagtgcagtgggcggtaggagacctggacagcgcatcacgggcaaaaagcgctcagtgatatcctcctgccagccagcaccaccgtctacgggaccaactgcgtctcctgccagtggtagtccgagtaggtacgacacgtcctgcagtgtcagagccatctccccatagggaagatggaacgtgtgcgtctcaggcctccagcgatctgccagagcggcaaggagtgaccggtctgcatcccaccgcctcgcagggtctctctcgtctgacccgcctcaacaagcctacaaagcggtaggaggcctgccgcacgcaacctgcataatggaaagtcgaaaattagtacatcaaattgaaagtcgactcaaatgtgcttaaaaaaattgaaaataggcgtaccacaaacgtgctgcgagtcgacacgcaacagctggcgtgaaggacgtggacggaaggtgccgagctgcgcaccctgtaccgcagagaggtacgagcggtggctcctgtcaatgccatgactcaagagctcaggtgtgtcgtccgccatagctgcatcaaaaataattatcagaaccataataaatagaaataacaacaattcaatgcgcaattacttaaacatatgagtaattaatgatagtataaacttcgatgtcgcatgctacagagattataacaacagtacaatgctatttcacattgttcacaacacaataacatactgtttaacgataacaacgaaattcattgaaattataacatatgagtacttggtacgacaacattaggatacaatactcaataattcgcaatacatgactactaatttcatcacattacatgacataaatacttagtctcagtacttattaggatacaatactgaatagttcgcaatacatgactactaatttcatcacattacatgactggaatacttagtctcagtactaattaggatacaatagtgctcgagttcatggttcaataacaatattagaccatcgcatcgcctgccgcacgaggacgcctgggacgtgctcgcctggttgttgttccttccccagctggtcttcttccatcacttgcctctccagatggaccaacatcctcgacgcttggaccctgtgcagtctttgggcatttcttgtaagtatggccgtgctggtcacacttgctgcagcatagagtcctcccaccagcttccgactcgtccatgtcatttctgatgcgtctagtctaacgccgcccctttttcacccttaacttcgatggaccgggaatgaaaaaaacttgggacctctgagttgtgtaagatcctgagatcccgaacccatatatctcctcactccaagtatgaaagattgcttccttcctaaaataaggtgacacgtacacatcgggacgtatgccgcaatcacctgctgctgcaagtacgtaagagcaaggtagatgtcgaagcttaggcttcatacaggtgcaactgcatcccccatcagccttcaatacacattcctgcacggcatgcttacgcatgattccacgcctgctcctatcaacacacattatttcgtaccgatgaacttttgttccttgaggcacaactctatgcctctgtgcctttgcaattttatcttccatgtacttagtcactacactgccaaatattatcttgttatctaccattgagggaccaattttcttgtatcgatccctgaagtaggcctgcgtgccgtgaaggataaattcgactataccaaccaacggtagttctcgcactcctcgcattacccagttgtaaacctcggctagattagttgtcattatgccatatcaagaaccatcggtgtcgaacaatagagaccacttctcctttggttcattctcaatccaatgactgaactttcggatagatgatcctgacctccttctcattgtgggtgggtcatcatgtagtgcaccaagaggtactggaggctcgtcaccttcagcttgtggtcgacgagattgctcatcagtttgcttgcttgtcaactcatccaacttattccacaactcgttaaattttttctcttgattctgtgcacaaagcctcttaaaaagatccataagatgcttgttcttgaattgcttgtaaaaattagcacccatgtgacgcatgcaccaccgactccaaacatcgggccacttagctggaattcccttctcctcccaaccgttctgcaagtagtcaatagaccgcaacatgcccgcatgacgatcatgtataaggcaaacattgggcctcatacacatgacttttctccgcactctatccaagaaccaataccagctttcagtgttctcactctctacaaatgcaaaagccataggtaacacctgattgttcccatcaactccaatcgctgtcaatatctgacctctatatttagcggtcaaaaatattccatctatacataacacaggccggtagtgcacaaaagccttcatgcaagcacccaatgagaaaaaggctctttgcaacacactcttgttaggatcaacagtcgatggaaatgtatgcacgtcatagtatgtattgctattcctctgggcaatgttggccaatagacgctgcaaattatcatatgatgattcaacagtgcgatacctcatctctaaaaccttctgttttgctctccaagccttgccataggttatggtgtacttgaatttgtcttcaatgtggcgaataattgctcttggttcaaagccagagttaccgacaacactgctgtacatctcacttgcaacaaaagctgatgtgatgttgcggtgatacttctcgaccccttgtaagtggcactggtgctcggtcacaatgctaactttccaataatatttccatttacccttatatgcatgaacacgccacggacaatcttctttcacgcacctcactttatacacataattggttgacttgaccaccctaaactctctcatcaatgagaccgcccaatgcttcactgcctccttcatatcctccttatgagcatacgtagcaccctcaaattacctcgttatccttgtattcccagggtacatgatgtccctctgagataacaagtcccaagaagtcctcgtttatccaatcagtgggcattacatcaccttcctcgtcggatgatgcatcgccctccgcttgcttgttatccaaatcttccctctccatttcatcaacgattgtactaattctctccccctcatctgccatgcccatggcctgcaccacccctgtgtcatttccgtcatcttcccccgatggttcaacaaaatcccccacatggcttggaccctcgacatcttcggtttccattgcaatatttctatcattttcatgcaccaacacaaaaataactaggggccatgacctttcaaaagccatctccagataccgtttctaagcaacagtgctatgcatcggcatgagttcccaaaaataaccttctgttgcacgactcactacaaccgatactgacattgtgtggacttctgagtctattctaaatcctcacatcaaccaattataaattgattgaaatgatctctcagcaggcctatcgatacccttcgatgtcattacaaaatctgacagatcaacaccatcaggaccgaatctaaggttgccttcaccgtgaactatctaaaacatgaccttacttgacattgtgcctgatgaaaaaatatctatgttaactaagttcatatcgtactaaccagatctaaccccccgttcatcaatacatactacaccctaagttaaagatactacaaataagttgtatgtcctatgtctcaaattctaaaataggatgtattacctgtgatggagtcagcaaaccagcagagcttcgccgcgccccttctcctcctcacccctccctctttctctttttcttgattttgagtgaatataatgaaaattctgagagggggaaggggttttatacttggaggggtaaaaatcgccctccctaagggcaagaagggggtcgcctgcaaaattccaggccgcctcgccacccttttgtaggcggccccccgcacagtaataaatcgcccttggagagggcggcaagggggccgcctgcaaaaaaaaccagtccgcccttttgcaggtggcccccccgcatagtactaaactgccctccgtaagggcggcaagggggccgcctgcaaaatggcacgccccctatagacggccgttaggcgtgcgctaacagtggtcagccacgtcacgaaaatcgccctcgccctctcagagggcggcgagcgactacttttgcaaagttttgaaacacaaaattacttttgtaaatattttaataaaaaaattaaaaataaaaaaattcgatcgccttgccgccgcactgtaccggcccacccagggccggccctgggcataggctggttatgcgaccgtcttgggcccaggctggcggggggcccatcaccaacccccccctcccccggcaacccagcccagctagcagcccacgcgcaagccaggagggagggatgcagaaggccgcgacgccgcttcgctagtcgctactagttcgcttatgtttctgtttttctcctcgcaaatcgcgactccttctctgcgaccgcgacgcgtctcctctccagctctccgcgcagatggcgccggatcgctgggcgcctggccgagtggccggctggccgccgccacgccggggctgcctctctcatctgatcgtcaacgccttcacgcccgagcctctgagcctcacgcctccacccgattccccatctccagtggcagtctcctgttgcggtgttgccggtcctaagcccgtggcaaactgaggttagttaggtacttaggttaattaggcaaataccaaactgaggtttcttgcttgcatcattgtatgaattttccactcgaaaaattaggttaattagactataattttattggttattgctgtataatttattttgcaatatatttactatttcaggtgttataatgttacctaaaaaccatttatcgggtgctcggaaaagaaacaaaagaaaaacagcaagatcaattaattgattcgcaaaacaaatgatttggcttcaagaaatatgtgaagaggctctttttataagggacatgggatacttgcggtctgctattaaggtattaatactactttgtttctatggtgttttttagttgttaattatactatcgattttaggtgtttctatggtgtattgcaacttgcaaactatttgatttattatttaccatgttagaaatgtttatttgtgtcactatatagtatatgtgctttatagagtacatatattagaagtaaaaatatttagccttagggtgtgtttagttcacgctaaaattaaaagtttagttgaaattggaacgatgtgatggaaaagttgaaagttttaagaaaaaatttggaactaaactcggccttaactccataaggacccatagtgcaagttcgcctagggcctcctaaatatcaggaccggccctgggcccacccacgactgtcacaccgtttcaacctctgcgccgcgctctccatagggctgtcaacaagccgaggttgatcgagcttgccttccaggctcaagctcgacacaagctcgagccgagctcgaatcgagccaagtcctctttcgagcttttaagcaggctcagctcaagctcggttaggctcgcgagctcgaccgagtataggataatgtatattagatgataaaattttgtaaaaatcaataattttaattaacaatatttaagaaaaatattatgataacttaagattaatatatgatgccaaaatacactaatttttcacatgaatagatactaatttatccttgagatagaacttatcttatataaaaggaaaaagttacatacacagttaggctcgtgagaagctcgaggtcggctcgacaaacctcgcgagcttgtagctaggctcaggtttggctcatcaagagctcgagccaagctcgaatcgagtgtgagacgagccgagctcgagcagctcacgagcctcgagcttttttgacagccctagctctctagctacaagccactgtcaccagcctcggtaacggcctcctgccatcgcccatgcccacgcccacgctggcctcacggcctccatgcctccgccgccacccgacggccacatcgtgcagccttcgtcattggggagtgctgcctcactccgccccatgcctccaactgggcactatcgccatgaccaacgccatcgacacgagaagcagcactgtcgaagcttcaccgctgcccctcctccctccctccccaatctggtcgtgtgagggccagctcagccacgttgactccggcctcctcagtaccggccgccagcacgcgtgctgccgctcagcctcatcctcgccccgtcgagccgccgcgcacacgcatggccttgtccctctcctccagccagatccggcggtagggtgccggatctagccgcggaggtgccggatccggtcgcggcgccactggatctgaagcatttcgctacgccgccatcacccctccgcgagagatacacaatgagcggtacccttgtgacaaaatctgatctcccatgttcccaatcctttgtacttaatttccaatacagtagattgcatcactgatcactctatatggcatggtcagcctgctctccatgcttgctgtaattattgcagacagtgttcatcacagtgaacaacattgcataagctttcgtaccttgcaaacagtaacttccctgttccacattatgtttctgttgaagcatcgagtgtggaggtatacggagctatgttgacatactagcaaatgcatgacccactctattggtaatttagtggctgacatgcacccaaaaaattactctttcttggaagattacgtgtccatcatattttttatctctaatcttataaaaattgaaaatgtttttttgtctgtttggtactgttggtaactttgaccaacttttttgacaagtcgacaagcacgatcgcagcacctaaatgccttgcggtgatatggagttgccaaccacctcgatctaaccaaacggccaaatcaagatggtttttgtagaataacagctaaaccggctagcggagccgatttagagatcaaaatcagcctctaggccgatttagatcgatatgaggataactacccatctcgtgggcaaaacggaaggttttcaggacaaacctataaagaggtgtcgcactctcgcagcggcggtggacgagttacaacgcaaatcgacaaagatggactaaaactaggataaaatagaaaacatggtaaaaaccaattcaagtagattgtattcggggattacaaatgacattgtcactatcttttccaacatccacatgaccgatttgtaatttggtcttaggtgacgatgctatttcactttgatttgtaatgcaatccgaaccgtcatttagttcggctatattttcaatggcgctattgtctaagctagcagcacaatccgaaccatcacttggtttggctattgcatcattgtctaaactaataacataatccgaaccaacacttggtttggctgtattggttgttgcattatcatccaagctagtgagacaatccgaaccaacatctggttcggctatacttgctatttcattatcatccaaactagtatttaagctatcgtcatccacttggcttccctgagccagagctttctgcatgagttgactaacatcaagaaattgttggccttctaatctttctttaataggagcaattaaaccattaaaaacaagctcaaccaaatctctattatttatattcaagctataacatcggtttctaacattccaaaatcacttgatataatcaacgacagattcattgtacttttgtctaaccgatgttaaatcacttagcctaagttcagttttaccagtatagaaataatcatgaaaactttgctctaattgaggccaagtatgaatagaatttaccggtaaagaagtaaaccatgtaaaagcagtaccagacaaagataaaaaaaacaagcgcaatttaaaagtatcagaactactagcctcaccatattgcgctaagaattgatttacatgctcccatgtggtcctactatccccaccactaaatttggtaaattcgagaattctataaccatgagggcatgggatgctgtcataattatcaggatacagcttttggtaaaccttagcacgattccttgcttcaatcccaaatttatccctaatactgacattaatcaactcctccatagtttcaagccttggtgaatttggtggccaaaaaggtggttattgcggcgcaatattgttatattggccatacccggcgtcatgagaatatcctctattatgatcattgtaagcattaggaatatgtggagtagcatgactaacagtattaacaggtgatgaataataattaaaatcagtactgctagtcgtggtatgaaaacctagagaaatttccagggaaccggtctgaccggccaagcatccggtctgatcggcccttggcccggtctgactggtggtcagtggtgcggtcagaccggttacaggaggcctgatctggccaaaatagggcacagtctaactggctacggtgagcacggtctgactggcatagggtgcggttagatcggtgtcacaaccagtcataccgttagctaggttttgcatatagctgattcctgtgtaatcggccgtataaacacccattgaaccccatagcattataagcatattgtatagcagcaaaactagaagtagcatatgtatctacacaacgattattaaccttttgaatagctagggatgggttgggtgaatcggaggttaccttatcgtcaaagacgcgtttgtgaagaggaccaggcttgagaaccacaccttgacgggtcctaatgcatgatttcatcgatatttcgtgcgtgatcgccttgatccgctcctccatgacttgacgttgctcctcatccagatcctccctccaatgtaaccttatcaatctcgttctcgctcgtcatggttgataaagaaattttttgattaattttggctatatagctcatagccgaaatatttagactgaataaatttacatacggtcttataatataattttcattgtatgcaactgtacttagcaaaaaattggataatttgaagcttcacggaaataaccgatacagtaggaatcggcccctttcttttttttatgtgaacagtagtagatcggcttgaatagcctgatctttttagcacgtgcacagtaataaaaggaaacaaagctcctgctgcttgtctctcggcaaatcgatctttgatcagaaaaaaaaaattctctgctgccgtgtgaagcaaagggaaacgaggttgccgagccggctgcagcctcctgccgattagattggccactgcccggtcagacctgacatagctacttcggttagaccggcgcaacgaatattcagatcggcggtcaaaagaacaatgtagccgatctaaaccaatcaaccgagtgatcaatgtatttgcttggtggcagtaaattgatagattaatttcggccgtttagccgaaagtctcgattttgatgaaactgtaatttctagattaaacgaaattcggccgtgatatggccgattagattgttctctagtggagttgtcaaaaattgtgttggcaactttttttttgacaagttgacaagcacgatcgcagcacctaaacgtcttgcggtgatatggagtcaccaaccacctcgatctagccaaacggccaaatcaagatggttttttagaaaaacagctaattaaaccggctagtggagccgatttagagattaaaatcagcctctaggacgatttagatcgatatgaggataactacccgtctcgcgggcaaaacggaaggttttcaggacaaacctataaagaggtgtcgcactctcgcagcggcggcgaacaatttacaacgcaaatcgataaagatggactaaaacttgggtaaaatagaaaacatggtaaaaaaaaattcaagtagattgtattcggggattacaaatgaatcggccttgtccgttaaatatgggttggtcttgtcctctacagggccttcttcatgtccaacttgagatagaaattaaaggaaacacgaaacatagcctttccaaaggaaatccgagactcgacgaaaacagactcggacttagaccccgacggtcagaccgtccacatacctacggtctaaccggccttttgaaggaaacccggcagttttcaaacttcggcaatttttccggtaccaaatttgagtgtaaacaggtacgtcatcctaatcctaatccgctttgtgttccaattaagttacatcacccccagtccttagcagcgatcacccgtgccgcagcccgtaacgaaaagaaaaggaaaaaaaaacatatcaattggtttcctttcattttctctaattgcgcccttctgcttgccgctgcacgctgttggcgttcacagcatctcaccaaaaaaaccagtggtgtcatgccgcgctgtcctgccacgccgagagggcatctgattcatcatcaatttccgtcgccgcactgacacggctcaccgcatcacgcgaacacctccagaccagccagccctctagagcacttcttccaccaatcactccctacctaatcacgttgaatctgctgcagttagctttgcgattttcttaatcaaggaccctttattttgctttgcctaattgatggtgctatagaacctatgatattgatttatcggtgcaagagttttgttatgcgtagcatgtattacgcaatgcagctcgatcacccattactgaccaaaacacatacttctatgaattttgctgtgtctttctggtgtgcattcactgagaaaatactaactggaaataggagttgtacctgtgaatgtaaactcgtgctcttggatgtatatcatttttgcaaagatacatggaaatattagaagtattttttgtgatgtcaactgtagctcttcatcaacgaatattgatatatttatatatatggttattttcatcatgtttttcttacttgtcagtgaggggaaaaaaccatttaaactttttagtaagtattcgttagaagaaaaaaggtaaaaatgagttattgagtattggttacagtgattgatagattaaaaaaaagttaattgtctttctatcttgctagggtttgtcgtgctgcagtttttcccgttgcaatgcatgggtaatttttctagtatataatagacatgatttatatatttggcttctgccccaagagacacaaccataagtttatttaacaaataaaaaagatgaaaaataatgggacaaacacactactataaaacgtcaaataggtgtcggcactataggtgccagttatgctaaaactggctcctataggctttttccccacctccgcgggttaaaatataaaaaccagcacctttaaacaattataggtgccggttttaaataagaaccaatacctatataataggtgccaacacctttaatatgttatatgtgtcggttaattaaaaatagacacatataatatattataggtgctggtttgttaaaaaaaccgacacccctaaatttgagccgagccgagctggcctccacagaccacacttatcctctcctgcgctcctatcgttatacattcccttctcccttgttggtatttcttaataacattagtagaaatataattcctagtaatggcgcagaaatactcctggtatattatggttacagagttcatccgcaagcgcacagatataccattgtagcatttcacctgagagtattctaagggtatcatatttgtttaatcccgtagaaacatcatagtagagagaaccgtactaataatttatatgttacttctaacaatcatagtctaagcatgggttaagataaatcaaggatagagtgacacacaagatcgagctactcattctcgtactaaaatatgagaatgatagaaagagaatctatttctatacttttagtatacatagtatacatacattctaattatatgattaactagctaatacaatctttccgatgccctattagtactccaagaagccgcccctacctgtcgtgtttcttacgacagcccgtcatgaccatacaaccggggctaaatatggaggagtaccctccccaggaaactaactttggaatatatacacgcgcggaggaatacccatactgagctatcaccatcagcggcccacctctcatccgcagcatataaccccaaataatgataccccgtaatctagacaccacgcctaaactactagatactactctaatatcatcgtcatgacatagagtaattgcataagcaaacattatactcgtacctatgcatctcccagataagctagcagcataatcagtataacatgaacataaagtaaagttagcattcatatgctcggaatgtatttcaataccagaaatgtataaagaagagtattctaaataaagtacaaagcttacaaaagaggaaaggaaagctactagagccatacccaaactcttccgaaggcttccggactccgatttctattctattccaactcaatgagcttaagaacactaaactaaacttgagagaatatgagagagtttgcttggagtgtgtgagagaggtgagaaggtgaagtccttatatagaggtaggtatgacggttgtggaaggggaaatgtccgaagtgccctccaaccatcattgggatgcaatcctggacgtccatgccgaaccctggcctcaatggtggagatgggggtttggccgaaccaggggttcggccgaaccaagggttggcgatctcctggacttcttctctttgtagacttgtgaattttggcccaattgatcgtgacatttctgagttcttggtccattcatacataagtctgattctcgacatcgtccgattaatttatcatttgatttgatgtcgattctcctctactttatgtttattctccgcaaaaggttagtaaacctaataccagcggaatattattattctaacatgaatatgcattgcaagcataactagttctcctctagtttggtagtattgaccgtcgaaactgatcgttaacgaccgtcaacaaaaccccccaaccttgaacctttgctcgtcccgagtaaaggacgaaaggacacaaaggcttggttgttgatcaggaattgctaccatgttgtatatctcaaatgtataggtccaaggtatatgtactctctctaaaattaaataatctttggcacggtggcttacccttatcactgattcccacgagacactgcttctccttgccttgggcggttgatagacagaacagcaattagagcactaatcacccaatctttattcaacttttattctggaagttttcaaatgattttgcaaaaaaaagccaagttcctcaaatgattcactcagtctctccaagtgtatcaatatgaattcctcaccacattggcttttcattcctactctaaggtttgatatgtggagctcgatagggatcaaacatgacatacttgcatttacctttattactaaaatagatgacaaaacatacttaagatcaagatcgtgcaaagtgtgtgtgtaatatatggtagaaatgaaacgtcaagaaaaataaagaaaacgcttctcctttgtgcttacttccttcaagtaaaaattattcttttattaataaggagagggcatggctatattccttttttttcaatatcatgctcattgttgcgggagcataactttattttttttccataaccatgcctttccaacccttcttctttttttcagaaaggattttctttttaggagaagaaagcacataaaagcatggagaatttattttggtggtagtatggaaatggaatggataattgctagctcccagtgtaggagtttagcatgtgcatatatgtgggtgcatgatcttaatcatagagcatgagaagtatctacacaagttacaagaattcatcaaagttcaatggaattgcatgtaactaaaatgtatatgggttaatcaatgatggcacatttttgaccctggtaggaatttatatcaaatgaggaactttttaaatttatcatttggaaattactacgcgcttccatccttgtggtgcagaaattgggtctcgatacaagtgaaattctaccccacgtcttcaaagctctcactgacgagttttgcgggttcatccatcatcatgtcatagacccaactggtgaatacaacatcaacaaggtcccacaacgagtgcaatcttctactcctcacccctgggaccaagccgcgaagaaattagctcctaggaaaagaaaaaccaagtagctagatttatgtgaaaaatgtatttaattattgtttatgcatgaactatggaactgtactttatgtgtaatgcatttgaatttttgctattattatggcttctattttatgttttctattacaggctcgatgacttgacggcaagaaactcttaaaatcatatgctcaccccatgttggaggtaaaaaacgatcgcatttatatttttgcacttatgaattcttagatattgtagacttaggaatttttcacttacgatatatatgtaaatgtttagagcatttgagatgttgtagagctctagcgatttaggccctgtttgtttcagcctaagagtattgtaatctagattattaaatcagattattctaagctggattataataagctgacatagaataagctgtgagctgtttgtttctctcgattattggaggcatctaagagtagtgggtctttagccacctaataatctgaaaaaagctcctcaagaggagattattagattatagtaatatggcttatagattataataatctatcataataatctacttgtttgtttcagcttactcctaataatccatattataataatcctaagttgaatcaaacagggccttagtcatgtctcctgggatgtgtaacacttctggtcgccgccttcgtgtggtttgaccggcacgtctcaggctgaagttgactggcatgctgagtcccagcaatatctcatttgctctttacttgagaatatgaatgtgaattatatgcaaatgtctagaatttccacttacaattttctggacatatgagttttagacttgtgaattcatgacctaaggatatatgtgcaaatgaatgttcacaatttagacataggaattttttgacttaaaaattttagacatacaatcttttgacctaggaattttaaactaggcatattttgagttaggatatatatgcaaatgtttaggatttaaagataggaatttttggatttacgaattttgacttaggcttgtaggtttttatatgttgtgatgaatggcttgtaggtttttatttgttgtgatgaatatgaatgaatgtgctgtatggatgtggggatatagggatgaatttgggtttatatggaattagggttgaatggatgaatttactgcaattattattttttttgacacaacaaataggtgccgatttttaggcttgaaccggcacctattaggtccatataggcgccggttttgacctcaaaactggcgcctatttgacagccacgtggcaatttagattagaatcggcaccttttaagaccatataggtgctggttctaacctcaaaaccggcacctatttgacagccacgtggcaatttggcttagaaggtacctattagaaccatataggtgccggttttgacctctgatgacaagtatcatcagtgccgcctcctttgtgccggttcggaaaacctgcacctattagggtttccgaaccggcactattaccctttctgtagtagtaagttgaaggaattggagatgtggcaaatatagatgaagacttgactagaggcatcgcacggataagcagtttcagttagcttttgagtgtaaattgactcttaagtatatatggctaaacatggttgccaatattgacaattgtaaatctcattaggtatatttttcgtgctttttatgcttttggtttcactcctttgggcaccaaaacaagtattagttatcaaatatttaaatatcatcatatacttttcacaacaactcaaattgaacctccaaaatttgctttatcaggaattaattgtgcagtttatagtctatacaattttaacaaaactcattcaacctaatacttttactgattttcatcaactggacatactactactacagaaaatgaaagcagtgccggttcgtaattgacatcaatgcgagaaatagacccggcataaaactttcggcactgataaccctctgtcagtgttgggtcccgacctggcacagatattcctagaagcacctatgcagaatctggataggtgtcgggtaaactgtagtgaggggctgtttagatgggagtaaaaatttttaagtccctgtcacattggatgtttagacattaattagaagtattaaatatagaccattgaggaaaacctatttcatagctatggactaattcgcgagatgaatctattgagtctaaataatccataactagtctatgggatgctacagtaaacatgtgctaattatggattaatcaggcttaaaaaatttgtcacgtgaattagttctcatttatgtaattagttttataaatagtttatgtccaatcatcctgtgtgatacaaactaaagtttagtcactggatccaaacgccacgtgaatctcttagactcttagggcaacctcaatgtatgttgccaaacttaatagtagtgtggggccaagagtgggaccaagagcaggcggtagtagtacatgatagagtccacaatgtatctgtataagcactaggaaataagctgggaccctcttaaagaaaagcatctattctcagcatcatgtgactgtaccaaaattatagtttatttcttattgccggcattagcactatgaccttgttgttattgtttatcacttccacaatgcttcttaccaggtagtagggatcttttccatgcttactgcctggttttccatacattgtggatacccttagtgatgctattttttgtccagcttgatcattactccctccattccaaattgatctacatatttcgtagatacacaaagaccaagaaaagctaataactctctcatactatatttactctagcaacaaactcaatgcatacatcatccccactatttcctagccaataacaaatcaagatattgcatgtgggttataaatacttgtatgcatggatggctggatgcatgcatcaatgtctatttactccaatgcacaaataacgaataaacctaatgaatgaacacaaatagaaataatccaaaaaaaactatatatatgtagatcaatttggaatggatggagtattttacacttctgcttcctctagctggaatcagatgtgcacgaaggcatgggagcatggctatgtttgtgcgatcaatgtgttttgtgagatccatcacaagtgagaataatattttctgccgaacagtttcatctgtttcttatgctaaagagactgcaatagacgcacgactcaatatcaatacacatgttatgcatttttgtacgcatacacccgtgttccctgtactcgacagagaccaaactccaaggtttattaaggtatacaaatctcactcaatcaagaggatgtaaatgttgataacgtgccactaacaaaaaagataatatgtcttattactttgtaattgtcatgtcagtgcctgtaaatcttagtaggtaagagggttcttcgttgttataagctgcaaagcacacatatcgactggagtactatttaagcatgacaacatatcgactggagtactatttaagcatgacaccgcctcaattaattactccctccatctacttttgatttactccctccatctacttttgatagtcatatttcatcttgcacacagaccaagaataagtagttctacttatcatccatttaaacatgctactagtcattcctcgtaaacaagcgactcattgatatttacgtttctcgatgcctatgtagccaatcttgtgtggaagaatagaaagtcatgcattaaatccgagaaagttattaagatgataggttgttgaagtgaaatatgcctatcaaaaataaaattttcagatttggaaatataactatcaaaagtagatggagggagtattaactaaagtaaccctgcagatcaaagcgttatttaatagagtaatttaataaaacccaattagtatggctcaagctgcaaaagactgcatatgtttcggcaagtctatacctctataccattattaattgggcactttctatgagctctcacattaaccagaaaaatccaaccgttgattggataaatcgtggtataataaccattgatgtagaaaataaccagcgcatagcaattctgatgggccacgtaatagcccatccgatgaccgagcaaggagctgattcaacccgttcagattggacccaataacacgcacaaaacgtgaagctctatccaatggctgagaaaatttctatcgcctgcaaaatagcaaagccggattattatattctatctccaatacttatctccagcacctaaggatagagagaaacagatagagttgatgacagcggcgatggaagacacaacagatgatcaatctggactccaaccggaggcattagggcaagcaaaattcgttgaagtttcaaagccaactctagggcacaccagagacgaccttcagatcattcccaggtactgtttttcctcaatccagattggtttctcatcccaaacaatatcaaaccttttgggctgagatttgccattgcctgaacctataaatttgataggtcataaatcaagatcactactaggaaaagcattatcgcaagcggccaaaaagggtcttcgcaagcggggcggccatccgtctgtaagccaacgactgtgaaaatcgccgatcttcgcaggtggggcggccgtccgcctgcgaagataattttcgcaggcggacgttggctagtcaagtgcgcctgcgaagataggaatcggccgcctgcaaaaaaaaaaaacttccgcctgcaaagataggtagaaaatattgaaatttaataataatttgcccgtaaattacttttaaattattttatagaaattcttgcaggtagattattatgtacatatattggaagattatcaagcatttggtactgataaatctacatatattgcataactcaaaagtgttgccaaaatatatatattacaatatttttttagattgtcacttcaaataacggcatagcagtattccactcccgaagatccttgtattcgtcacttgccgctagggcaccctctgggtcaaagaaatctcctttcacatgacagcactcatggtggatgaagtggcacatatcacgctggacatttgtgatacctgtatcgtcaaagcttgttcgacgttctaatcttggcaactgcatgcattgaagttaatcaatatattagaatcataaatatgtgaagctgtctagtacatagtatagaggcttacatcctccgcattagtccagtaccgtccattaaccctaaggaattcgcacgcataatacccgcaaaggaccgttcctcgcggttgcttgtgacacttcaggacatatcatagaaaaaagtagttacaatttgcaattagtgaaagaattggaatacgttaagtgagtggagtattaccggccaataggtacgtactagcagcttctcccttgttcgggtctgttctccacccttgaacttgtagtatggtatacactgtatgaatgtcgtaccgtttcacattaaggaggatatttatttataatacattcatatagaaatgcaagagtcataatcacttactactgtaagatcgttagaaattctttgtattgcttgtgactgtaatcgagagggtccaagactaccacggttccgtctttagggtggatgagtaaacagatataatgatcgctacatattaacaatagtgtagttagttagtaccagctaaagtaagacatatgtgtacaagataaatgtatcggacttagttaaaattataagcggccatgatgactctcttattttgaaagtgcaagaaggcacgtccaatatactgtgcgacattaatcaatttctccttgtgcaagcccttcttgtattcagctatctcttttggattcttgcccttcaactggtcagaccctggtgcgcagcctcacggtatgctgtctttggcagatccgagttggatccaagaagccgatgggttcttttttcttcttagcatccatgtattgcattctacagaagaagtttgttagtaacaatcacatggatttgtattgtacataattttcatataattaattaaaactcatactcacatgcaccaaacaccgacgtagttgacgtccatcttatcccgacgatatatggcgtggagatctgagaaatctagccatacgtaaccttcttcgccgaaacaatctgctggtgatcgagctgttatattgcccaagcctttcttgctggcctccatgtagatggtatgtaaccttttcatctcccatggtccttctttcagtgcctattccggcaagagtgctttcccgtgttcgtactttttcgggcaattatcggttgcgaagtatgttggcccggctagttcaacggccttctggggtcgtcatctctaagcttggcacgttccttaccccctctgaagacggttaccatgaacttctccttgttctcatctttggaggagtcgtggctcctaagcactctaggcacctcagaactggtagtggccttctcagggaccgtggtctcttgcacctcggggtctttcacaggagaaggggcttcaaatattttaggctctgtactgtcccattccaatcctggtacttcttctagttctgacccgactgatgccacaaattgcacctctggttctgccactgtaatctccatgggcacatccggcactggaatctccatggctgcctccggcggtgcaatctccatggttgcctccggcattgcaatctccggtggcacttccggcactggattttccttttgcatctcgggttcctccgccttatcagtcaccttcctcttaggaggtctcggaggttttcccaaccccggtttaggcaccacaggtttttgcgtggcgtcagtgcccaatccaaaggatatgtcattcttgtgccagagaattacaagatcgaccacatccccaagtacggatacaccatctgcagttgggaagtcaatgtcgtaggactcaaaccctccgtggaccacttgcggctgcaccttggcatatgcatcgggtatgaactcttcattgtatgttctcccagggatagcaatggctatagcggcctcaagagttttcccagagcgtccaatgggaacgtgcaatctgcagggtgtattctccttgaggtcatcgaaggggtaatctggctcaggttctttggttttggggcgaggcaaaagcatgtgcttgacacagaaattcatcatttgcctttcaaaatccgcagccccttcgtccctaagtttatccttgtacgcatcacacttcttgtgggggtcatgtttgaacccttccttccaactcatcttggacgacacacctcgaaccctacccccatgctcaggagtacccagcgccgtacttagcacatctttctccctcttaggcttgaaaaatcctttcttctgtgaactggataaattctctattttatcggcaacaccctacagctccggatcttcaaacgatactttgccttcatctgtgatcttcggagttctagctcttacccaattccttgatctctatgtccattcctccattggtaccggaagccccgccttcctcatttcctcctcttttgtccactgctccacctttggtgcgtatcctgcggagcctaagcgatgaggaaatttgttcttcttggccaactctgcatacttttggctccttcgaatttcttccggggagttcttcaacgtcaaaaagtcgtcccactgattcggggttatgttggcatacgtcgaaaatggtgtgcgtcccgtctttacaaatttcgtgttcaaggtggttttccaaccacaccaagacttggccattgtttgcagggcacaatttctcactgctgcctctgatccatccgggaactggaagattttctttcactctttccataggacttgcttatccccattcgatacatgatcccaatccttgaccgtgatggggatcttttcccttactattatgccacattgtgaactgaatttcgcacgtgccgtcttactatcaacatcagtgccgaccctgccgatgcctagttcactcgtgcaaacaccaccagtgcctactacaacaactcaaactgctgcctatacacatgagggtcatgtcactcagcccagatcgagctccatcaagcactcgaccttcgggcatgtgaggtccccatgcactcctttacaggtatataggcgcaagaggagcaagtcactgccacccttgtctagttctcatactcctgtgctaattgcctctactttaattccgcctatttgtatttctaatgggctggtgaacttggaggaaaagaccgaagggcttcgtcgtagtgatcgttgcaatgcagccatatcatctaatggcattgcagctgccgatgaggattcaacgacgaaggctaaatgcagggcagcgatgagaaatctggatgggccaatgatgtccaagacggctgacttagcgaagtcatcactttcgtctacatcataccttgacccttctataggtatgcattctaacctcccatcttcttccattgtttatttatccaatgaacaattttcctccaatttgggaaagataggagtttctttgggtagtggaagtgaaaacgtggccttttctgttaatgctattaaacatatggaggttgacagatggaaagtagcacctaaacctaagatgaaagctaaggttattgatgaagcgaatgatcaaaatccttttcatgatggtgatgatgaggatgccgaacctgatggcatcttactcgctcacttagtcaaggaagtttctgaagttgacttggatgatgcggagcttagcagaacaatttgtgacttaatagctacacctcgaaaatccaaatctgcctcaaaaaagaaaggtcaatcgaccaggaccaaaagtaacaagaacaaaaaaggttgtaaatgaaaggcatcttctagaatagcagaggtctacatgacttggctaaatattggtatgttgctgggaacattaaggaacacaatcttgattttgttgctttattggagacaaggaagaatgatgtgtcaaagacgaatattgattgcctagcttgggcgcagatttcgtttggcactgtcttccccctcgtggcagatcaggaggtatattactcagtattaatgcagctgtaatggacttgtctttgattgtggaaggggaattttacgttaaattccatttacgcaacaaagaggacagattcgaatggatcttgatggcggtctatggaccagcgcaggatgaattcaaatctagcttcttagctgagctagtccgcgcttgccaacaaaatccacatcccacgctcattggtggtgatttcaacattttgaggagtagtatagagaaaaacaacaaaagatataatgaccgctggccttttctcttcaatgctgtaattgacagttttgacttaagagaaattgctttagcaggtagacaattcacatgggcaaattccttagccaacccaacttatgagaagttggatcgagtcttaatgaccacggagtgggaatccaaatttccgatggtttcggtacatgctcttgagcaaggggtttcagatcatactcctcttttgcttgattctggttctacggctttcatcgggaaccataaacagttcaaactagaactaagctggttgactcatgatgatttccacgaccgtgttgtcaaaatttggaacaagccggtcaaagggcgcaacttggtccaacaatggaacaataaaatgagtgctttgcgtaagcatctacgaggttgggcggcccatatgagtggtatgtataagcaagagaaaaaaagtttgcaatcgaccgtagatgaattggacatcgctgtggaggttcgagtcctgactgaagttgaaagagatcaacttactcaagcaagagatcgactggttatgcttctaagagaagaagagacaaagtggtttcaaagggccaaaacttctgatgttcgtctaggagataataataccaaatacttccaaatggttgccaatggcaaacacaggaagaaacggatattctacctagaacaggacgaagggaaaatagaggggcaagcagctctcaaggcctacattactagtttctataagaaactatttgggccacctgaagataacccttttacactagatgaatctaggagtggggatatatcacaggtcacacaggctgaaaatgaattcctaatggcaccatttttagaaaaagaaatacgagatgctgtatttgacatggagcataacaaagcacctggcctagatgggtttccagcagaattttatcagaaattctgggaagtcattaaacatgatttgatgaatttattccatgaattacatactggtgaattgccattgttcagtttgaactttggggtgataactttgctcccgaaagtcaaagaagcgaatcgcatacaacaatatagacctatttgtctgcttaatgtcagctttaaactattcactaaggttgccacaaataggattaactcggtggcggaccatgtagtgagtccgacccaaacagctttcatgcgaggacgaaacatcttggagggtgtcgtcattttacatgaaactttacatgaactgcatcggaagaaactaaatggagtgatcttcaaaattgattttgagaaagcttatgataaggtcaaatggccatttttgatgcaagcacttggtatgaaaggattctcaaccaagtggatttcttggatcgagtctttcgtttcgggtggaagtgcatcaataaaagtaaatgatgacgtcggaccttttttccaaacgaaaaagggccttcgacaaggtgatcctctttcgccgatgctttttaatattgtagctgacatgttcgtcgttctaatcaatcgagccaatgtagatggacagatttgtggagtagtccctcatctagtggatgatggcatttctattctacagtacgctgatgatgccattctttttatggatcatgaccttgagaaggctcgtaacatgaagcttctgctttgtgcttttgagcagctctcaggtctcaagattaactttcataagagtgaattattcggttttggtgatgctcgagccatggaagaccaatataccgaactctttggttgttcttctggcgaattcccattatgctgcttaggcattcctatccattataggaaactaagaaatgcagattggaaaggggtagaagaacgcgttgagaagagactcagtagctggaaagggaaactactttccacaggaggacgtttaacattgataaactcagtgcttagtagtcttccactgtatatgatgtctttcttcgcaataccgagaggtgtacttaagaaacttaattattttcgctcgagattttattggcagtgtgatgatcaaaagaaaaagtaccgtttgacgaagtggagtattatgtgccgacccaaagaacaagggggtttaggaattcatgatttagatatgaaaaacattgcccttcttagcaagtggttatttaagctactctcgaccgatggggtctggcaacaattgattcgtaacaagtacttgggctcaaaacctgtgtcacaagttgagtttaaagatggggactcacaattctgggccagccttatgaaggtcaagcgtgactttttactatttggcaaattcattatgagagatggtgcccaaatcaggttttgggaagacaagtggttgggagaagcaccattgcaagaacaatatccttgtctatacaatatagttaggaataaacatgatactgtagcaaaagtgctacaaaattatcctccgaatgtatcttggcgaagggatctcattgggccaaaattagtggcgtggaataaccttcttccacgaatcgctaacctagttcttactcaggatcaagataagtttcattggaatttaacccaaaatggagaattttcagtgaagtcgcattatcttgccttggtacattcagatttgcccaacatagacaaagtaatttggaaattaaaaataccgcttaaagtgaagatcttcctatggtatttacgtcgtggggtagttttgacaagggataacctagctaagcgcaattggcaaggaagtaagaattgctgcttttgtcacaaagatgagacaatattacatttgttttatgagtgcagatttgcccgttttgtgtggtgcattatacaagtggctacagggcttttcccgccacgtggtgtatcaaatatgtttggtaattggctacggggaattaggaaagacttgaagtcacttatcctgttaggggcagccactatttgttggccattatggctttgcaggaatcatatggtgtttgacaaaagaaaaatctcttctcctttacaggttatttttttaacaatccacttccttcgtacctgggctattgttcacagtgaaatttggtaatccgtggagtaatcatcggcttagagtcagcatcggcttcagagtcctggaatcggccgatgggagtcgtcaagtcgccagcaaccgtgttctcaatggagtcggatcaattaaagggaatttatctagaagagtccgagttcaagaagaatgtggcatggcaagttatctattaattaggaatagtttgttagtttccttttatctttaggaaagtgtgtttagtgtccgataaggactttatcttttccttttatctttagtttctttcttgtcctacaaggacttgtatcaacccatgggtataaatatgtacagccggagtttatgtaatcgatcaatctatcgatcaatactactctcggcgcatcgccaccctcttccctgaggtttttacttatcttccggcggaatttgggcacctgacgcggggctgcatcggctttcgatctccggcgaagggataagtcctatgttccatcgggccctggtgaatctgtcggctgcattggtgttgttcaaggctgcatcgtctcgatctcttggatcgctctggtttggttgatatatttacctacatgatatcccaattctacctctaatcgcattgtgtttagagatgcatcggtttagttggaactgtctcggttagatccgatcttctatcttagccgatatatctctacaatcacaatgttgttatgaatagatttgttatatccatcacattagatagatctatcggctcatcgagtattagattatcatatacaatctcgtgctgcatcggttaggttcgatctactatattgttgttgataatataagtcttgttaagccgataggttcatgctaatgttttatcggggtgctagccgataagttatctggacgttgcatcggcttgtaaggattgcatatacatataagctagatttagccgatggcaacaaaggtttcactgtttaatctaatcttgtggattttatgacatcggacctccagccgatgtatgctttaaccttcggatcagtgtttattctactatattacattgttagccgattggtttctactggattatattgctatattatattagaatcagccgattgcctttatatcattatctacattgagccgattgcttaaaccctatcgctatcggctggtaccggcatcggctattatcggctatcgattggaactactccaacggcttatcagccgatcggctgtttgatctattatttgcaaatcttgtcagttgcaggattaaactgactggcacgcacgcatctcattaatctttggacctgcacaggagctaagcagatcttccaggccggtgtgttcgattttttcatcaacaactatccttcagaagcctggttcatgggatttggttgcagcggcgtgtcagcgcttggagcaggtggtcagggaatgttttaccaagggacatgggtggcggtctagcctgaggattggtgctccctgatttttactgctttccttctcttgttacaaactcttttgtgggtttgtgtgttttggctgtgtgcatcctagttatgcagaggccgggagttttcttagtatggttctatcaacttgatgtaatcgtctgagattaataaaagcttcctttataaaaaaaaattaaaacaacgcaacaagatatatagtactacagcaatgtgctttgtacttatgtagatttcaggatgctaggatcgattcttgttcggtaagaacaatatatatgtagtttctctgaattgaatgaattgcacaacttagagggtgtttgggagagagggactaaagtttagtccctacacccccttatatgttcttctgccgagctcacttaatcttgacgttgcatacatgctttagttttcttcatacgaaatttccaatattcatgtacttatctgtgtgcagattgctgttaaataaaatgtcatatttcttttcttacatgttgtgccactaaatttccgaggaaaatatactcacctatttagtactaacaatacgaaggtttaataaagggtacctacaaatttagccatactcggctacccgtgaactcttcacaccaagaaagatctacaattaggaataataggcatttcgtctctgaggaatgtatagctccagtgtcagttccctcaaaaagaataaaaatttcttcctgtaaagcgaaattatttctttgataagcccaaaacatttgtatctcagctaaaattatttgtggtcagtgagattttgcaaaataaatatttatacagcatagagatattctgaactgacacacctaccaaacttgaatgtgctaaatgaagtaataattgttcaatgcgtggtcttctcaactataaaatgtgcactgcggacttagaacttttggtcatttggaatgtacagggtccacagtccatctggtttacgtaccttgtcttagtgttagaattgtgaagagatgcagaagctctgtttttacatgctgaaatatgttactgctgctgaaatcatagaaacacatatcatcgtagggttgggaggctttaggagtatttgtgtgttgcagttacgatcagcatgttggagttcctgttgatgttgttgtgaaacaaatattccaacaagggctacagatggatcaatgtatttgttccaacgaggaggtaattaagggttgttcagattgatgccattttcaaccataccattttctggcatagttgccaaaaatgtgtctacgtttagtttgctaccgaactttagtaaatacataagaaatcctaccaaaattttagcaaggtttattttggctacaatctgaataggccctaagtaaatgccttattcatagggttcgccaaccattctgggtggtcgatctcctcgatcacaccagccttgagtaacttgtgcactttggccttggccgcttcttgacaatcggccgacatctggtgaagcgcttctacttccatggcttcacatctggcttgactgtcaaactccacctacttcgtcaggcccccaggcgaagatgtccatgttgttttctattacattgaaaatgttgcttgcctctgttttgctaagatcgcacccaatcaagacaactttgcatggatcggagttgtcaatttgatccttggtcacctcgccatgtggagacggcttcagcacaagtctcgtttcatcgccatcttgagcatgcaaagtgttgacctcccggcgatctgccactgtttgaccagctgacgtggccaaaggctacaaccatttcaccaccattaattcacatgggcctgacattttaagctttaggaagtagtggtgggcgactgcctcaaaccttttcagcatggtgtgctcgaaaatggcattgtagtcgtgggggatgttgatgatgtcgaacagaattatctcctcgcgcttgttttctcggtgggttaacgccactttcagcttcacttgatccaagacttggatcacttcgccgttaaaaccacgaagcggagccggtgcccatgatagggcttgcgccagcagcatctttgagtaagcgtcatcaaagataacatctgtcaaacttctcccgtcgaccagtatgcactgaacgtcacacccagctatcgatgccgacactaccagtggatcttgacgaggaaaagataccccctctgcatctgtagggctgaaggaaatttccctggctaggaatcttggtgccccatcggccaccgaagctgctgcaatgttctacacgctgcgaatctgcattttattttggcgcttcgacggctgtgtctcaggatcggctcttgtaatgagttggattattctcctatccccttcttgttgttgctcaccctgtggtggtttttttcggtttactttgcacggcgcatcttcgccactggcttgaccgggcttcagagcttgaggatggccatggtgctgaagcactattcagtggtatgtgatgatttcccgtagtacacacagtgtctattttttttgtatttctttcttgggagttgctcttggttgcccccttgacttgcgtcgaagttcttgcaacgatattggacttcttcgaccaccatcaccactttgcccctctctatgcgaaacttcttcctcgtcatggaccttggatcttgtcttggggtcggggtttggttcgtcggttgcatggggcaatttgccccttgctgtggtgctggttcttgcgaacttgcttgggcagcgacagccttgtcgtaatcatcctgaatttcacgtcttcacttggtaacctcttcgcctcaagcaaagccatcggtgatgcggaaaagatgctcaacagtttggggctattttcttgcaatttttcttgtcagttcgctggggcgaaggccttccgaagttgcgttaattacataagcttcggtgatgtcttgcacttggcaccttgcttgagaaaaatgtcttgcgtattcccttgtggattcacctggcttctgccgaatgccaaacaagtattgctgggtttttggctcctcatatgttctccgaaaaatcaggacaaagacagcacgcaactgttaccatgagtatatgttgcttgagggcagattgaaataccacaatcgggctatcccgtccaaagcgaggtgtatcactttgcccttggtattctcatcgccgtgagctgcctctatcaccgattcgtaagtcgacaagaactcacttggattggtttcgtccgagtaccttgtaactggtgtatacttgaactgcgttggaatgggataatttcgccgcccccagctcagtggtaatttcttttcacccccgcccttagcgacgaaccttgttggtactgcggcaaaaggcccgggcatggaggcgcgaaggacatcgctgacgcttgcaactagatctggacgtttggctggactgtttgcgctctgtcgctcggcccagccgttgcaccttgagaacatgccaaaggcgtgtgggctgacgaacttgtgtcgagctggctcggcagttgccaagccactacgccttagtttgatcccccaacggcctggaccgaaggggttaaacttggaattgcgtggggctgactcagttacaaaaggaatgcttgaaattgcgcctgaagggccggagcggcatcatccgaagcttggattgtccggaccggctgggtcgagacaaccgtggctcgtgctggagccattgttatttaagggggctatagccaggggcatggaacacatttgtaccatcgaagccggctgcaccacttgagtcgaagcttgaatggccattgtgattgacgtgggtgtcgaatccggagcgtgtcatgccgatcaggttgccttggcttgtagggctacctcgtacgcctaatgctgctcttgcatattgcgaagcatgtcttgcagccttgtcatgaactgtcgtatggcttccatctccgccctttgtgccgtggacgcatcggcctccatgcttgcctgagttgcggggtcggacgaagtcgttgcttgggttattgtggcttctacttgttgcccagttccgacccctacttgctctccacccccttcgactcgtggctgctccagctccacttcagtcttcacaggatcatcggcttcgccaaccatctcgaccttgtttttaccctcctttgtccttggcaccactctttctctctcgcacagaattcttcgatggcatcggtggtttcgtcctggcttccccacgattgccactagctgttgaccaatgacaactgcgttcttcaaagaacgtggttcactgttggttgaaaagtaaaacaatgtgtattaatattgaatttttttgggattcccccattgcatgcccttcgggggctatttatagtcttagtacaaactcatgcaccctaggactaatagatacacgggaatttatatggatacccttatgatagggacatttataagggtaattggagacattttggccatgggcccttaatgggccattacgtgggcctcctacgggggatcaaccccctcttggccttcagttctctagtccctaggcgaagacaactggctcggtggcgaaggccttcggcttcgcccatcagctttgcccggaggcaccgcctttgcggtaatctacacttcattgctgtgcttcgccctgatggtcgctgactcgtttcaacaggtccggtcgagagccctcgtgacatctctccaacattagtgaagtgaactaccaagttgaagtctggaaaacttaatttaagaggacttttacggtacattgtacttgaagtatatactaccagtatatttgatctaacggtgtaaattcatcttatcttcctcacaattattcagccctataaattgaatagggtatatttgtctttttatctatttgtgtgggggttaattttgtaaattcacgtgacgcgagatatatcgacaagaagcgctatcacgcggatgatgagatccggaaaaaaaaaccaaccgaaggaaaattaatccgatggaaataaatatctattttaaatgactaaacaaccattttcagatttttaacaaatactaaatctactttatcatataccggtaatatatacttgcagtacaatataccataaaagttctctaatttaatggctgtctaattagttagacatacagagtcctgatgtttgggccaaagtacctagctgaaccagcagagtttctctcctctttcctttgcagctaaggaaaaacgcttcatgttttagtatcttccacggaaaggaaaatattctcaacttttagtttgtcaaaataataattgggattctttaggcagcccaggtccacgtgttgcttcatattctcttggaagtacacgcatgcttttgttttttttgaccgtataaatactcgggtacagttaaattgttctaaataaacttctagtgttatttgtcagtgttttcaacattgttggttattggcctgccatcaaatcgagattgaatagctaaatcttaactaggagtagatattataaagaagacatttaaaatagttcacataataactcttttccaaaatataaggcgcaactactgttttccgatatcttatagcataagacatgcatgcatataagtaactagcatccctcctccaaatttgtcttctttttaatccttcaactcaagattctattggattagggcgatcaaaataaagagatgacaatacttatttcttagttgtgttagtggttgtggtgtcttatattcttggaaggagagtgttaattatcgacacggttgctgataaacagaaagaccatatttaactgttttatcctgggcacttgttttactctacttgaacatttaacattgcccccatacttggaagcaggagaagagctgccaagcagcaaaacgaatgctaggtggtaagcaaaagaaaaatattacttgaaacaaaaaaaaaatggcatattacaacacgattttgttttttgaagctgaacatgatattctcccgagaggttttttcttacagttgcatcttctatgttgatttgcataacttgcatctttgagagtggcaggtatccaactttctattttcataattctaattaataatatagccagtagtgctttctcgtttgcaaaacaaaacataagagcgctcctgaatccagtagctactggacacattgggcgcaacatgagaaatgaacaaactatattccctctacttttacaaaaaagtggtccgtaggaacaaagcaaggcaaagaatcaagtgattttgactcgagaataacttagcctgcatactagaggaaaggaacagagaccttggccactaccatctcattataaataggcgacccggtatatgtgcaatccactcattgggtttcttgtgctctcatgcatatgtatggtcttctcctgctatcaacgaaaccaagccatcaccaccacgtctccttactgcgaaaaccgccatggaaggaagttctgcaagccaggccaaggccttgttcaaagccactcttcttggcctggccatcctatccatggtgacatgggtgccacacatgtattcctgcattaagatgttcttggtttcggtcccttccgcggcttccaccctcgcgacaccgaggtgcctgttcatcttctccaacatcatcgtcatcttcctcgccagcgagttaaaactctccgagggggagagcttcggcgagtctccgatcccgaccaatcatggctctgatgattccatcagatatagggttgaagctttcactctaactaccaagtcaaacgatgtgattgttaaccatgttgttgaagagcaagttagcacggtaattgtacatgatgacagcctgcaacagctagatcaatgtgaacaagtggatgcttcatcaaccatgtccatggacaaggaatcgagacgagacaacaacaataataacttagcaattggtgctaatgttggcaataatggagaaagtgaggaagtggaagaacagggaggagcaatatcactaggcaaggtaatcgaggaggaaatgattgaggaggaagatgttgggttgccaactgatgagctgaatcgtagagtggaggacttcattgcaaggttcaacatggagaggcagcttgaggcaaggatgcttgtctgctgctactaaatatatgttttgaggcaaaggatccatttacagaccatgctcatgaaatagaattagagcaagtgtaaggaaatttgatgtgctgcctctaagattgttaattaaataggattatgtgatgagtttgagaagagaagtgatgaaaaagagagaagatgaggcatctcccgtgcaagaggtagcctctatatgtacactataacaaatatgatagcactaattaggggtttgtttattagaggtaacatgttgtatatcttgtctattagtttatgtgtatatgaaatagataaaattagagggaatatatagtcacctctattatcaaacttgcttttattgtcccttaatcactctctatgaatgaatggaataatttttttatcaaatttcatggtttataatttatagtgtatttaaattgcataaggtattcgtgtatgttacatgtagttaaatcagttattaaaaatcatgatgtcttcattctaagtaaatcttacaagccaatctgcaatttaaatattaaacagattattaccaaccaattttgaagtaaaataaaaaaacaagttcaataattcattatatgttaaattatctatgtcattatctaaaaaaatatattaaattgtctacaatggcttgcatatattaaaccatcaggtatttggtacaataatgctaattactctcatctcatgatattggtagatgatgaccgaacagtgtacatatggaagcaatttcaaactctaacacggacagctggtatgtcctttgtgtaggatcgtaaagggcctttcccaccccaaaagctagccattgaggtgaggggctcccccacttatatgttaggtcccttgcccattcacaaccaatatgggactattcaacaatctcccccttcacacattggtgtccctcagcccttcaccgccccttcaccgtatccgggcccccaccggcccacggtccatcaggtatacgggtcccgcaggcacccacggtccatcaggccttcacacgtgtccatcgggccagagatgttaacctagccaggctctgataccacttgtaggatcgaatcaaaagaactaagccaaccagaggggggtgaatggttggtatacccaaaaaccgaaaacttttagcggaaataaaagttaccctcgaaatcgatggatcacggtctgaccgaagtagttgcgccggtctgaccgcctgatgaacgtcggtctgaccaatgtagatcgatcggtcgaaccgccgaaaacgcctgtcgccgactcctgtagccgccggtctgaccgctgtgtgcccgccagtcggaccgccgagatgccgccggtctgaccgccggtgcgccgccgattagaccgccgaaacccggtgaaacacaaatcgaagaactcttaaagtggatgacgactttattacttctctctgtgtttacaaagtgcaccaacagcattccttacaaaaatttcgactaaactcgaaaccttaactcaaaactcaactcaattgctctccgtagcgataccgggaagcctcacgctccccctctatttatacatgaggtaggcagcctaaagccacgaaccaaacttatacatactagtacaagaaagaaactttacataaccaaacgtaccaaatttggactccttccaaattcgactccgcatcccatacgcacacaattcctccatcgtatgccatatggaatctccatcaaccacgtgcatcaactcttgcctaagtatcccgcatgatctctgaccaccacgaacgtcgtcttatcctcaagccgactcccggtccatcaccgcaaatactctcccgagacatcgagtcacctacacatggaacaaacaaagaaaccatattccgagactaagctatctccaacttgactcattagcagcaaacaatagtattacatacgtatagtatccatctagaagccataatcatggaataaactcggatattcaaataaacaacccgaaacagaaaccgacacagtgtcggccggtcagaccgcgggctgcgccggtctaaccacgcattacacgccggtctgaccggctaccagagcccggtctgaccggtccacataaaaccacagcagtacctgtatattcacctgtgaaatccaatcatctccaaaaccacttcgtgaataaattccaaataacaaaaccaataaactccaatgcccaattgttcatcacagaataataatcaaaaacatcttagattttacaatctcccccttgatgaacacattggcaaactcataaaaatgttttgatatttggtggtaaaaagcacacttcatacaaatgtacacatcgtgctcaaaaaatccaaaagaaaacttctctccctttttaaaagaaagaaattcctaattgaaccaacaaacatgctcttctcaacaactctccaaaaattcatcttgcttctccaaaaatccaaaaattttcacattacttctccccctttgacaatgatttcatcaagcataggaattatgttcattaatgttcaagagcttagcatacatatagcatatcaagtcatgtgttgcaataaaaagaagataaacccatctataacaaaacaagcatgcattaaagtataaccatgaaccaaagattttacaattaagcttgaatcaacaatcaaaattcataatttcatacgatttataatgcaacattttaacaagcacataggttgaagaacaaacactaaacacatatacctattgcattgatcactctttctcaaataaccttttagcacaaaataaccaagagaaatttttttaactttttcttttcttgagcctttttactcatatttttctctttttattccgggtacgtccctgtcgtcaagactgtttccagggattcggcacccattattttgctcacatcgaatatgtccttgtcgtcaagactgtttccaaggattcggtattcatttttttcatagttttattctcttttgcacaatgagcaattaaagctatttgaggaataacaagtcaataaagcatatatataaagcatttatagatcaaaccatatgctagcatcaacattgcatatttgcttaattcaagtatagaatttaagtgtcatgcatcatctcccttaaaagcaaaatctaaatctcatgaaaagactagaatacatacaagctatgctagagacaaataaaccttcaaagtattgctagcatgcacaagaaaataccatatgcgtaaacaaagctctcttttctcaagtttttcattgtcatattattgcttgataaaaccatgaggtacaaactccccctcaaaccatgccaaagggatgaattacgcccaattcaccacgaagaaaagcaaagcgattagaatccaaaggtttagtgaacatattagcaattttcaactttgtgtccaaaaactgcaactcaacatctcatttctacaacaccattttgttgaggaacacgaggagaagaaaattcatgttcaagacctctttcattgcaaaattgttcaaatgaagcatttttaaactctccaccattatcacttcgaattcttttcaaagaaccaggaaattcaagctccaatcgaagaaacaaaccacgaaagtgttgaaaagcttcgtccttagttgccataaagaacaagtatatttttcacgttgtttagacacattgttagaacaagaagatttagcaacacaagcagaaacaggaggttttacatgcacaacattggattttgaagaagatgcattcatagtagacatgataccagcagatttaaacacagttttattagtatcatgtttaatcaaaatctcacctcttctagcaccaacacctaacacaacaggaagatgtctagaattatgagcataaggatcaaaacctaaaccatggttatttgtgctaacctttgattgatccaaaatcatattgaggttctttttaccatcagaaaatcttagcaaagaatttttcaaataagaaacctatttttccaaattagcacaattttcacaatctaccatgacatctttgcttttacgacatttggggcaagaaagcacttcattgtttttcacaacatcttccatatactcaacacgacctaaagcatcttttagtttcatcttattcaaattacatgttgagcaatccaaaacatcatgaggttgtattaactttttagcagaaatcatgttaaacatcaaactagcatgaaaagcaatttgatatttttgcaacaactttttagttaaaaacaactcatccaaagtgcgtgtgtgcaaagcaaaacaacaagcaagagaagatctatttttcaaatcatgtgcagcgttaacatctctaatttttgaaatctcattcattaaaacctcacaattttcacaatcatcatcattaggaataagagattttaacctatcaatttcagatttaagagattcaatgataaattcctgttttttatacatcttcttacactttttatttttagcactcaaaatattaatagcttcctcaaaagcactcacctcattatcttcatactctgtgtcagattcaccacgcgccatgaagcaaacatcggagacattctttcccttatcatcatctccactttcactatctacatcacttagtggctcgaaagcggcgcaaacttgttgaaaagccttcttaagattctccatcttcctcccttggttagaaccctttgacttgttgtagttgttgggcttgttgttgttggtcttctcaccatctttgtcttctcttttgcctctcccaagcttagaacaatgcgaacgaagatgatcaattgaaccacattcaaagcaacgatttggaccacctcttttcctgttcctagcattattcatagctcgagcaattctgttagcgaccaaagccaaatcctcctcctcgatttgttcgagttgatcatcggatgtggcattaaaagcagcaagaaaagaaggcatagatgaagaagcatcaacaatcaaagaagaagaagaagaaatcaaagcactcgatttagaatcaactttgcgagaaagaatattcatctcatgtgttttcaatttagtataaagtgaatccaaagtcaaagtagacatattaacagactactgaatagatgtaactttcatctcccaaatagacatgtcgagaccattcaaaaagtgacgagaaatttcagattttggataattagcatcataagaagaatcaacagatctaagatcactcaaaattttattaaatctagaaagatagtcacctaaagcctctccagatttcatctcaaatttaatgtactcctttttaaaaagatctcgacgaagttctttaatattatttgttccttgatgaaagtttttcaaagcattccaaatctcatgagcagtttcaagatgtgcaacacgatcataatcagaacgagaaatcccactcaaaataatattacgagctttgcaattgttttcaaattcagtttttaaagcatcagtattaatggcttcaggaatcatataaggatgagaaactttcctccaaatatcataattttcagccataatgtaagattgcatcttactacaccaatgaggaaaatcagttccatcgaaaatatgaggcttagttgaaaacctagcgggagtagccatggcaaaaactttagatcgataaaaatccaaagaagaaaacgaggctctgataccacttgtaggatcgtaaagggcctttcccaccctaaaagctagccattgaggtgaggggctcccccacttatatcttaggtcccttgcccttccacaaccaatgtggaactattcaacactttgtaaattcattgcaaagttgccacgttccataatacatgaaatatttaaaaaaaatttccttggacacaaatataggcgtaatacagatcttgttgcagacatgaaaaaaatcaataatttattcctggtgatgacggtgttgatccaaacaatttcgctatatccaaagtttggccactatttttcttaaagttaaccactttttaatacctaatgaaaatgtacagggataatattctgagcatcatattctccagaaatgaaaaagcagaaaaagattgactatgaagtacgcagagaatcccgaagcagtagatgtccctttatccctttactttagtcatacataattcagcactatgttctgagaatttcctttttaacgccttgcacacgtgtcgtctcgcttggagaccactattattccaggcatttctaaccagattagttaggacaatattaactattattccagatttcttgtatagacaattaatatactatctccattccatattataagacgtttcgggtttaccatataagagatctaaaacatcaaattagtgtcattcaattcaccattgaatatatttaatccaccattgaatatattttatagtatatttctcagatcaatgaatattttgccagtgttaatgtatattatatttacttgattttggaataatatagatcaacatacataaaagattggaattaattgttatagttctatatcatgatttattttcttaaaataaatcagccgttgtacctaattgtaccagtgcgtgtccccttggaagttggaactacctcaacgattgtgtgtaagagtaaaaaacttctcactgcaaactatcaatgatatacacaggcattcacatcaaaaactttttccaaagaaaaaaaaaaaagaaggatccaatcacatcaaaatcattttccaaatagaaagaatgcagacaaacaaaatatataccaaaaagaaatcaataaatttgttgcttgaaatgccttaaccagtgcggaaaccatagagaagattgactataaataccgcatgtctgcagcatagcatcctgcattgcattggatccgtcctcccagagacgatggcaacctaatatggcgcacaatccctatttgcatggtgtagggtcacgaatagataagaagtctcaaatatatacatataattaattcccaacaaccaagagacaactacagcctaatgatcatactagaagccaaccaccatttctattatggaaacctaaatcttgatgattcgtccaaccacactctgttaccaactgcctacaatcaatcagggaaaacatcgatgggatcccatttcaacaaggaacaccgaaacagtgtgagaaataatgtaaactaaccttgtagcaaccaatttctaacaacaccatcaaaaattagagcaagactcccccgccccccctcccacacccatctagttggtcgaggaaaaacaagaggcaccactctgatctttgctcgatcagctcgagagggtgcaagagtaatataagggagaggtcaaggtgtcggttattatttagagccgacccctatgttggacaacctccatagctgccggttttataagggggccctccaacggttattttgacatgagaaaaggtggttctactcataggtgtcagttgttaacatgaacctttggctgacatcactcaaaactatcagttcctattaacaataggcactatgtcaccacacatgtgccggttgtctcggacggcactacaggggcacgtgcttagataggaaaagcgctataggtgccagttgtatgttttccaatacctacagtgtcatgtccttggatagtcttagtcctaggtagattacacacgttccctgagttcgattacacacattccctgagttcgatatacttttggggtcacttgaaggtgaagtgctacaacggtattctgtgcgcttacggatttatctgtggtcgtaagaaataccaacaatgatcaggtgatcatttacattgaccatgaagcctacctcaccttagtttacaacctagctatcctttacattattttgagtaattaggtgagaactctattgagtaatggttgtaagctctatgtgagcaaacttatatggttttcatgcacgaccatatttatccattatgacatttttgttctatgattaagtcttattcacttatacatcttatctaatattacgcatgtggagcctaaaatcgaggaagtttgcattgtggatagcggtaccacaaatacgatctgacgagaaacatgatacttttggaccataaaagaaatgggctagaactatgatgacaatcaccggaagcgattcatacataatcggtgcaggcagagccactattgtactccctatgggtactactctagaaattgaagaagcactattgtaccccaaatccacaagaaacctcttatatttcaaagacgttcactcagttggttttcatgtgcaaacttgtgatgacaatggtaaggaatacctactcatcataaaacatgcataatgtaagaaaggaattaggaagaaacttcctcgattagaaactaggctatactacacaaggatacgaatatccgcaatgttcactactgttaaggctgtgtttaaaaattctgattattttccctttggcaggccatcaaggtcttagagtgatgagagacatttttaacaactcgtgaggatataatgttaacgtaaaatctttcccgaatcaagaagattttgtgtgccatgcatgtgtcaccgggaaattgatcatgaaattgtctatatgcaaagtaaaggatgaaatccctacattcctggcacgaatacaagaggacatatgtggccctatacagcctctgtcggggctgttgcagatcatccaaattaagaataattttcctgatcatcatgtgcagtccattcgaatggataatagtggtgaatttacttcaaaagcatttgatgattattacattgcaatgggaatcaaagtagataactgggttcctcatgtccatacttaaaatggacttccagaggtgttgattaaaagaattaaattgatcgccaagccactccttcgaggttgtaatttaccaagcacatgttggtgacatgcagtcctacacatggaaaatctcattaattttgtaccattggccttaaacatccattcaccaatgcaactgatgcaaggatacacacaaagtgtcccgtttgcgcaaatttggaatcctagtctatatacctatcccactattgatatttctttacaattacatatataatccgcaaatgcacggatataccgctatagcatttcacccggatgtattctaagtcatgaccagaattatctttagatacataatctcaatggcagtaaatttgaatttggaaatgaaattgatgaatgttgtaatttcctacctccatggaaacttggacatgtacgttttcatgaaggtaccagaaggtatccatgtcccaaaccaaaacagagcaaggtatagtgtagaaagaagtcattgtatggattaatatagtgaggaagaatatggtataattgccttattgatttctcaagcaaaaaaaggctccaatagcaatgaagattgcccttatgtatttatacggagatcctaatatggattttgcataatatctgtatatgtctgttgatggcatcaagtgcaaactttcactgccaactcctgcataaaagaatacaaaatataatatcaaactaattggtagaagtttgttactaaccatttccactagcattggtaaatattagtatataggtgatttctagaagaaaacacactcgccatgtgactaaaagtacgtctgattaaccatatgtgagcacgaggatcggatggcccacatgttagtcaaaatcgacttaatttgagctaattcattgccaaccgctataagggcccacctttcatccactaggcaaacttagtgcctgtggcggtggaggcccccagccacctgcttccacgtgaagctccccattggtccgcaatgatggttagggtgtttaccgacttaagcaccagtgtacaaccgtcatatggaggctataaaaggagaagctcaattcacttccaactttagtatgtggatagaaccaagtggagtacaactcacttttatattttaggtagagagtgagggaaactctggaaggagtgccccaaataccgaagttttatcctggaagttctagaggagtgtcgggtttgtcaacattcttctattagagttccggaaaagcagcgaagttgttgaccttcttctctcgcatgtacctcgatggatgcttcttttaataaagtaagtattcgagaaatccttttcgtatttaattcatttgcttaagtgagatatattcccatcgttgtgggttcattgcttagttagattattaagtgctctagtattaggactctagataaagaaggaacttcctacgtgaggctagatgtaactgcctttcctccagaaccacgtagccagcccatccgacgggcgggcccacttacacaaatcaccccacatacacttgtgtccttgcttcgtgtaaaagggttaacccgagagtggtatggatggagagaagcggccatataagttggctttgctaaactagcaaggtggtactaaacatgcacacagctctcatgggccacacaggcctaatcctaattgggccagcatgtctcctacacccacatgtcaaaggacccgatgtccccgtcagcccaacttacccatgtagccacacaggcgtataggcaaatgtccaagaacacgctctctcttaacacatgtttgtacgtccagtgccggtgccatatgccatgccatgtgccccacatgcgccatgcgctagattcccacacactgacacgtacgtgcaaccgcgagggtcagttttgacaccatctctgtcgggaccccatctaggatccctcggtgtataatgtgctagtaccaaatcaccactagcacacacagtaagaaaagataatatcataaccacatcacggtgatataaataaataggaaacaaatatattttttagattggtcttatgaccatattttacaatttatttgccacacagggccaaacatagataaacagcgcaaaaacaaacgagaggcaccaacgacacaccacactagcactccaccttagcgtctaacgagggatggagataatggccgcatctaatacttaagcaacaataatctatataagaatgttgaggataggaaagtcaaattcaaaacttgttaagcaacaaggagggtcaagagggtgaattaatcattttgattttattttgaaaataattttgaatttgatccgaccattctaactaaggttgcgtcctacagtcgacatggctctggtaccatttgtaatagccctccctccagaactgcgtagccaacccatccgacgggcgggcccacttacacaaaccaccccacttacacttccgtcctcacttcatgtaaaagggttaacccgggagtggtatggttggagagaagaggccttataagttggctccactcttggttagagagcagtaatcaataacttaggcgtggtgtttgggttagcggttaccttcatttgttgtgtgctccacgaaaagtgatgtagtcggaaggtggtgacagccctatatgtcatttgtctccctccatgtttgggtgcatcatagagtcatatgccggagtaagcttggcagaccaagtgagagccgattccaaagcaatcgataggttttactttttaactcaagtacaataatttaactcataggaatcctctttagccttggcctatcattagttgttctccttggataaaattctgttcttagacatacacacatgttcttatgatttcatatccttggaatacattcaggtgaagagctatagcggtatccatgcgcttgcggatttatctatgagcatatcaaataccaacaatgtcgaatatttgaacaacatcgggacacttaaggatattgaagaagcaagctcgtatctgaaatctgagttcaaaacaaaagacttgggcaaagctaagtattacttaggtttgcaacttgagtattgcccaaaaggggttttagtggagcaatccactaacacaaagaaagtattggaacattgtctttgaaaacacatatccttgaaaaactaccatggtcggtagctcactccaagtagatcaagatccatatagactaagggattagggggaggaagtccttgaatcaaaatatccatacttgagggcaatatatatgagcgctcatgtaccttgtaaatttcacaagaccagagaaagcatttgtcatcaacttacttgccacgtacagtacatagcccaccaagagacattggaagggcgtgaaggacatcccagttattctatgtggaagaataacaatttcttggaaaccttcaaagcaaagtgttgtagaaactttgatgaaccactcggaaatcatcgcactatacgaagcctctatcaaatgtgcatggctttgcatgatgattcaccacattcagcaatcatgtgaatctacaattatctatgaagttaatgtagagtgtcgcacatgtgcaaatgggttatgtgaaaagcagtctcatgaactgcataagacgaacggaattaaagtattgcataccaagtcaagtgaaaatctcgcatatttattgaaaagttattacctgtatccccttttgaaagatgcattcgagggattatgatgatgagacttacagaaatgcaaaattgtaggggagaatttcatggactcacttgccaaactaggttcagaatgacaaagtacccaataaaaaaattgggtgggttattctcctttttccctcggacaagttttcttgcagtttattatcaacgttttaatgaggtaatccgggcaacacacaaaactctttctccatttttttcccagtggatttttaaggagttttattaagacataagcaatatatggtgaagaaccaagggagagtgttgaaaaacttgtgtttgggcccttaaagaccagcccaatacactaattggacctcaccctacttttcatatataagaattggctatttaaagggataagaggaaaagctttatgtagaattgaaagaacgtgaatgagaatactctatccctgcttatatcttgtgtctccacttttgtctacagttaggcaacccttttggattagctcttattggaacattgattcccagtaatgtagaataaaggagaactccaactttaatggttttataggacatggaatcaggtcaccaatcagacatggtcctaacgacataactatcacaaataggtgaatcaataatcggcaaaagtaacaatagatactcattgttacttgtccttctcagtacttttgccatccaatctcttgtacctaatggtactttgctctcccctgaccttacacaaattacagaagtataatacattttcgatagcacaagagtcttgctatatattattttgttggacatctatgactactatgaattttctaaacactttattgaaataggtgtcgagaggtgcaccacaatgtaaccacaatgtaaccatgatgactacaatgtagcgtagacgcgcaggtagatgatggcggcgaatacatggactggtcgcaactaggtgctatgtttattggggtggagctcccataatcatagacccgaatatgtaggcttcggctgaagctattgatcatataccgtgtattcctgtgtcgtcatctggcatatcttgggtgatcaatgactaaagcaatccagaaggttagttgtcgttccactatatcgactaacttttataataagttgtattagatcgcgggattggaacccggaacaatttccatgggtcacatggtgggggaagctaggtaataagtctccgaggtcatatgggttgatgtgatgggggagattggtgggccccatgtgtgatggggaggattgttgggtttatagtcccacatctgtaattgatggtcgggcgcacaacttaaaaggtgggggcagtcctcatctattagactagtcttttaggttgtgtaggcctaggacctaaagttgtggctaaggttgtaacctgggtaacctgggtgacccacgacaagtggactaggctaggcactcactattttctttacagtgcaagtactgtcactaccaaaaagccctacatatatatcagctcgtaggtgctgattaatttaaaaccagcaactatgcaccttttcgcacctccactggatgggaaaatatagaaccaacacatttgggcaactagaggtgccggttatagagtaaaaaactggcacgaatactttaggtgctgatttttttaaagaactggtacctataatattgtaggtgttggtaaattaaaaaccaaatcatataacatagtataggtactggttcttgtaaaaaaccggtacccataaaatccaagccgagcaggagcgtgagccagagagcgcgtccttatccacaatctccatcaacagtccgccactcacctgctcccttctctttcttctctcccccttctcccgcaatctccattgccaccaccaagctcctcttgcacaccatgcttcccctcctcccgttccctctccgtccgccgcacctcccctcaacctctcccactccctcgctgcctccctctccctctcctgtccttcccttctccctcttccctttcatcggcggtgcctacggcggtggccaagggtggcggggcccaaggacgctggtggcggcagtggtgatggtggtggccctctctctgcatccacatccccattatcatcccccacctatgaggatctctgtacttgtgtgtgtttttagtattctcctcttcttttctatgcacctaagaaaggaacacctgtgtttgacaaaaaaaagtgtgttccatgagtacacactacgtgttttacgagaattgagacctagcttacttattacatacttcatctatatcatattacaagtcgtttggcttttcttctagtcaaacttaattaagtttgaccaaatttatagtaaatttagcaacatctgtaatatcaaattagtttcattaaattcaacattgaatatattttgataatatgttttttctattaaaaatattactatatttttctataaacttagtcaaacttgaacaaatttgactagaaaaaaagtcaaacgacttactccctccttcccaaattgatcattgtataatgaaattcaaaatttcttaaactgatcatatataaccgcatagagacaggtttcatcagaatacaattaatacagcatgggagaatgtgtgcatactaagagtaggtataataacaaactataagacagctataaacatattttaaagggataaaggaagaaagagaagaggtgcaacacggactccgagacgtaatgtgtgtataacaggtgggaccaggtattaatggtataggaagcaactatcgtatgaattgactattatattagctatagatgatttggagctagtagtggactatacttctactattaaacttgctctaaggtataattggcatgatgttttaatatgtgcatgatattttgattgatacgatttaaattaatcttgatcttggagcataaacatatatgacgatcattttcggatgttgggacatagggagtattgggtatatatatatttgtggtccacgcaagtgtatacacgcaataagtgcatgagtacaaatctttggtgcatgacttgttgaaggtggtgggagttgatttggggaataagttagagacgaaggagtctaaatacaaaagtgtacatgccgtggatagccgtaccagagctgccacatctgcatctaatctcgggtgatacagtaaagtaataataggatttagatgtacagtttagatgtttatcaacattgataacacctctatctaaatttaaggatccacagtgaattttagtctatagtagtatattcttccatatgtaccatgatcaccatgctgatccaatttatatgagaagaatgtaatacttcttaggcatatccaaaacttattgtcaatttaatatgaaatagtaacacagcttttgcaccatctatatctatattctatactaattgggcactttctcggagcttccatgttaatcagattaatctggccattgattaactagatcgtaaaatcatgaccatagattaaatattataaccatggacttttaattaaaggcccaacgagagaaacatgtatctgggccaccatttaatctatatcggcttccttcaaagtctacaaactgtgtccatgtcgatctcagccaccggactcgactccacacacgacaagatgacgatacgacaggctatacgtcgatctccttcacaccctgccgccgttgagctccatcgaccgatctccagttcactattttatcgatgcagatgctattcagattgatctttgcagctatgattgctattttaaatactcaagcaagcaagatctaattcaatctatttagggtttcagtaagtattttttacatgcttctcatctattctaaactatgtataaatttcagattttaaggtatcgcaatttgatagccataaatttggatggagtttatcaggtatattcatttacttctaagttaaattctcccacatccttcataagcaaccaataggctttactgcgtatctttttcttaacatgaataatttactgtgtatttaattatttatttggttccacgcgtaaaacagctacataatattttgacaagtttgtctaggtcaggtatgcttacaaacaagggaacgtagctgctgcccctatctatttatgaataagaaacaaacaagcacttactttaatgtttctctttttatatttacagatgttaattagcattatctatgtcaggtgtaattagcaattgtcgatgatgtgggctattcttttaaccaagatgacaagataagttaaacatatatcactaacaaatctgctccatatatgcttcatccaaatacatttgtttcagtgaatgtatgatgtcatcaaaattcaatttagcagactaataaggagtaagaatgaatgatttctaactaggagtagttatgccttttgtcagttttaaggactatttggtctgaattatgtctactgtaatgatgtgggccacttttacaacacaccgatgatgtaaaagtgccactaaaattcatgcatctagcgtattataccaaattaggagaccaacacaaggacaaacaggtaccagttaattcctaaattcataaatattaaattatagaaataactgatacttctgatcaagtgtagcgatatatattaattactttcaaattttgatacttttaaatcatgaaagaactactattgattcgaaaatttggaacaattgttaaatcatgataaaacaaaaaataagatatcaaaccgagtataatatttttagttacgaattttaaaatcaaattatgaagatgttataatattgagactccacacaaaatacaacttaatatttaataattatgaatataggaatcattaaatcatgaaaaagcttaactccaaactaattttatttctgtacttattaattgaaaattgctaaattattttatagcaaatgctaacaagagcaacaaaacgagtataaatctatatttctaatattgaaattttaaattatgtaattttgaaaaaaataaagtaatagaagaaatattagaatggattatatatgaaattactaattaattaagattttggcaactgtcagcttcattcaaagtaacatattttatcattatccattgaaagtaataatattttaattattaatcacagtaacccgtgcaacgcacgggttgacggctagtgcagttaattactgccttttccagaacagaaaataaaataaaattttcaaataaaaccagccattaaaatatataatatcagaaaggggaaactattttccgacaaaattaaggacaaaaatatttcacatgtgccatcttaatgtcaagatagtagaacgaagaatatgcaaagcaccattatttaagctttaaatttgcgcatctgaactatatttgatctccatttttgatttttcattaggtaaatccagcatttccattatctatggttttcagctgatgtatactccctccatttcacaatgtaagtcattctatcatttttcacatattcattaatatcaatatatatatgaacgtaggaaatgctataatgacttacattgtgaaacggaggaagtacagtacaatatttttataaaagagagtgtaagtgtgtaacaagcttccaataaatggatcacagatttcaacactgatggataagcatgcgtccgtgcagcttctgcttgtcccctaaaaaaattattggtgatcctgatcatcgtgatgtatgcgattgcgcacaataggacatattccagagcagtgacgaatcatgataggataagttaatgtaatgtaacaaggcacatgcatgccgaggattagggcctctagctagctggagtacgcaccttttgcactctggaaatatctgcgtgtggttagatgtgatggctcttgtactaatggtcctctgttgcttaaagtcgataaatcataaatgtatggattattagacttatatatttggtcggtttgtttgtagccagatcatatgaattagttgattttacagttatcttaccggcctgcatgctatttctcgatataaagatgtttcaaacttcaccttatacgtactgttgtcgctacaaaaccattttctcagcctcctcacccttaatttcacatacaaataaaaatacacaatgcctacttaatgttgactatttagagggttaaatagttgctcatgtaaatagaaatcataaacaaccactaatgaccaccgtccataattatcaatatatataccagggcctattgacgtgttgaatatgacatgtaagcacaagtagtattttaatttttatagggttttactcttgctaagtatgacaagtgggttcttagaatattttgtccaattccaatatctcaaaattaatatatctatatattttagctcactaacatgtaggttatctctttttttcccatattgtaagaagctttgatattttctctaagtaaaattttcttaagtgtgtaaaaagcgaattaactcactaacaagtggacacaggttgaatatgtataggttctcactcacatatggccccatattattctgacggctcacataagcaacgacttttgaagagaattttcatggtatattgaaaatatgtgtaaaaaaatcatttcaaatccaattgagaattttttaaaaaaaatcacttcagccacattttccggagtttgcttaggtaatttcctccaaaactattcaattttatacgtatcctcactaatgtcatggtatctagtcaaactaaagcccaatttaaagattgtaacctttactatttaagaattttaagattgaagatatctagtcaaactaaaagcccaattttaagattgaagatatctagtcaaactataaagccacttggtacgtactccctccgtcccaaaaaaaggcaaactatgggtttccgtgtccaactttgactgtccgttttatatgaaatttttttataattcgtattttcattgttgttagatgataaaacatgattaatattttatgcgtgacttgtctttttaatttttttcataattttttcaaataagacggatggtcaaacattaggtatggaaaccagggtttgtctttttttcggacggagggagtaagtaattaaggaacacatagatatattgttttttgtacaaacagccagattaaaaaacaataaggcagatatactgatgggacaaatagtagcctctcccagacgcagatttgcaataaaccggttggtagtgtgctgtggtgtcagatggcccgtaaagtggaataatgcatgtttggcaatattccatctagctaccaactctctcgaaaacgtgtgccctaaacataaaaataaaatgtctccacgacgtgataaccttgactagctgctcaattgattgttgtcatgcaaacatatatatattgatcgatcgatgtacatgcactctagtctctataactctatggatgggattcctacatagcttagcttgcatccatcaaccatgaaacaactggtgtcgtacgtgctataccatactagttatagctaagctacgtgtggccgacaagacgaggcatgtgtgaatgtgtttagtttagcgtaaagtttggattatggttgaaattatagatgatgtgactgataagttgtgtgtataacaggttgatatgatggaaaaggactgaagtttggatccaaactttggatctaaacacagccttagtgagctgtaagcagagaaaaaactagacggagaaacacagctagaaaatatgatttttttttattctctccatatctctattagtccctgatgagtgggacccatcacagggaaactacgaaagttggccgtccatttaattttctgcgatgtgcgtgcatgcttatactccctccgttttttaatatatgacgccattgacttttgttataacctttgaccgttcgtcttattcaaaaattttatacaaatcttaaaaatattagtcatgcttaaagttcatttagtgataaatcaaaccacgacaaaagaaaatatatttagttaaatattttaaataagacgaatggtcaaacatgtgagagaaagtcaacggtgtcatctattaaaaaacggaggtagtatataacagcttaggcttcatgttcttcctctgatgtgtgtgttgtgtgcacggtaaatattgggaaaatataaggtgaaaacgatatatacagtataaatctgaaaactaccgttggatcgaaaaataaagatatgtgattcgtccacgtcatcatgagtaaaaattttactcgcagattcactcacgagagagtcaagtaaaattttttactctcaatgacatagacgaatctcgtgtagtatcgtaaagagcctttcccaccccaaaagctagccagccccttcaccgtatcagggccccaccagcccacggtccatcaggtatacgggccccgcaggcacccacggtctattaggctttcacacgtgtccatcggaccagagatgttaacttagcctagctctgataccaattgaaggatcgtaaagggcctttcccacccccaaaagctagccattgaggtgaggggcgcgctcccctacttatatcttaggtcatttgcccttccacaacccatatgggactattcaacatctcgaacgttcatttttcgatccaacggtagtttattagttttcacttcatatgtagttttcactgtatatgtagtttgcactatatatttttctggtaaatattggcagttgtaaccaagcaatgcagacagcgcttgcatgctgtagggctgtatagccacaggaaaacagacagctttgcaacaacgaatctagatgcacgcggcaacaagccaggcgatcaccatcctacgatccccctacacacatcacttttttcaaagtcatggagacaagcatgcagctagcacactgaaaaagaagccaatgatttcatgtgtaattatatgcagatggaataacttagcctgtgagagaaaacccccacacaaaaattcaggtttttcagagccttatatatacacccattctgtccatctcagctccatgtaccctcacatgttccaacaatcacatgcattcttgcaaaaccaacacacccaaagaaaagatctcatcaagctcaagcagcaacagtacacacaattgagctagcttgatcgtcctaattaaggatgggaatccaggaaatcgtcaagatctctctccttgcactaggcatcctcttcatggcgacgtgggtgcctcacatgtactccttcatgagggctttgttcatggtgtacctcccctccttcacctcggccgtcgtcgcgcccaagtgcctctttgtcttctccaacatcatcgtcgtcttcctcgtcggcgagtctaaatttgggcatcccaagatcgacaaggagaatgttgctgcagtggtagagggtgacatggtggtccatgagaaggaaggagaggaggaggtggtggtggactcggtgattccggcgatcaccggagatgatcggtgcgaggagctggaagacgaagaattcgccgttctagaagaacaagtggatgcattgttgagttctgatggtgtagagattgatcaaatcagagaggaaggtcatgatctagctgttggtgagatactcatcactgacatgatgagaaaggaggaagaagaaggtgttgttgatcagttagtccttgaagatggggaggttttggttgtggaggaaagaggtcggcgcgaggccgaggaggcggcggaggagagggacgatctcccgccggccgacgagctgaaccggcgagtggaggaattcatcgcaaggttcaacatggagaggcagctggaggccaggatgctggtctgctgctgttgaggtgcataacgcactgcttttttttttgtcttaattactgtatattaattttgagttctgatatcatgtatagaagaggatatagtcagttctcccctctgtacagaatatgagtagctttgaatcaagtaccatcaattttgatacattatccaatcatgttaatatatgtatttaattttgccaggattaattaataatattacgtctaagtttattctgctttctgaaagcttggaaaagacggaatctccactattcatctttttcactacaacaaaacaaaaaatttgcatagaaaagacactttaaagattgtccaaaatggttctgttctacatcttttccagatgccttctttaacagatcaatccttttaattgactaagtacaaatataatacaataatagaagattcttactatgaagtcataatacgtactcctacctctatttcagattataagactttttaacattgcccacattcatatagattcatctaggcacacatatatatctagattcattaacacatatatgaatgtgggcaacgctagaaagtctatagtatgaaacggagaaagtaatgttaagatcattagcatatcaaatactaggagcagtttactaccacttggtcttgacctcatggcatatggattgatcatatatagcaatgtttttttcctttttcttttattccactatgatagcgcactgcacaattttaaaatgcctcttaggtgaaaacagagtggcattctgtgaaacaactcatcacaaaaagagcacttatattcaggacttaaaagtttccaaatgatgcttctcatgtagtattcagttcttcacatatatttagtatgaatccaaaatttagtttattcaaaaagttataatttgtttcaatcagaggctcatagcaccttgttttcgataacaaagagcaacacccaacctacgaagtcataattaccatagggaagaaccaaaatagtaaagttggtgcatgtccacccaagtacggctcaaatcattgtaagtgtaaccatgatattcgtgattgcgaaagcaaattattggtgaccacttgcacaaagtttaaatgaaaagcgcataattataccgtcccaaagtcaaagcaatatttcagtttttcatagggtttatggaggtggttttgattttttttttaaataatggaaatggattacatttccggcttctgtcataagacacacagccataagtttaatagtaaaaaaaaggtttcataaaagtaaatcaaaatgagaaataaggtgatgggacaaaaccccaactcccctttattattgactagcgttaaatcacataaaatattttagctagcaattcttatgtaactacgccacccatagtggaataagaggcccttggctaccgattccaagagtgtagcaccattgcgcatagtatcctgctcctcctgtggtagcattgtagaccagaagtggagccagtaggaagacatgaagataacctgcatagggttagataattgtttaccattaaaacttttatcattgcgacaacgccaaattgaccaacatacagcgctagctccaattagaatcatcttcttaatggatctagatacccctctaagccaattaccgaaaatgtttttggcgttacggggtggggggatattaaaagcaaaaaacacacatctccaaacaaactgagcgacatgacactcaaagaaaagatgttggattgtctcttgtgcatagcagaaagaacaatgtttgtctcccccccattttcttttagccaggttatctttcgttagaattactttcttgtgaagaaaccacataaagaccttgatctttagtggaattttcaagtcccacagaattctctttttgatccgaacattacagttcatgatcgcggcatatatagatttgacagaaaattgaccattcttatggagcgaccatacaaagcagtccttttcatttgacagagttatattagctagcctgaggatcaaatcgttccactcgattagcttttggccaacaatagctcttctaaaagagatatttagcggcgttgtgctcatgacctctgctacagtagactgcttcttccgagccacattatataatgtagggtattgatctttgaaagcacgcgatcccagaggtggttttgattgattgagacgagaaaatatgtggaaaaatataaatgctggaagggtattattggttgatcgtgaataagaaacgttgacttttattttttacaggcaaagccttgagagatctgcttgaaaatacatttatttttgcaggcgaatctcttaagtctccgcctagaaaaatatgattttggcagagtcggccttataagtggtccacctggaaaatatgaggaccctgttaagtccctcacccaccaatcggatctccttcaccaatctccctatcctctccctctccctctctctctactggacacggtggcagcgctggccacagcccggcgacggcggaggggccagccacaaccaacgctggcagcggaggagacagcacggcccctcctcttcctctctaagatccggccggttcccctcccctcctcttcctctccctcccagatccggaggaggagaggagcatcggcagtggcacaaacggagaggggagggcgccggtagcacgtggaagaggcggttaggcccctccgcagatttggctcccctcccctccccttccttccttccttcccagatcaggcgaaggggagtggcgtcagcaacggcgtagccggaagggggatgccggtgcgcggaagaggtggcgcggcccctgccctccctccctccttccaatatccagcagacgggaggagcattggcagcggtgtgcccggagggggtagggtggcgacggcagtgcggctcccctcccctccctgtacctcctagatctggcggaggggcagcggcacgaccgaaggttggtgatggcggccggtggggctggtggcaggtttcttttcttttgttcaccgataataattttgtaggtgggtggctatagcgcctacaaagatgaagaggccgtctgtgaaaatcattatcgcagtgccgttgatcgcttgtaaaaattatgtattttcgcaggccttaactataggcggggtgaatgtccgcgtgcgaaaatttattttgtcatttgcaaaaaagtatgttttctagtagtagaagttgttatatttgtacaaagattttgaaggctagtaggtactgtattttgagacgaactgaatatattgctgtggttgctatattcttctttaaagggaaaattggaaccatgccattaaattggaaccatgtcattatatttttgcaaaatttgagatatgccatcctgacccacatgtcattgactcatgtgggtcctacatgtcattgagataccgatggcatatctcaaactttgcaaaattataatggcatggttccaaattacccttttttaaaagatctcgatttgcagataggcaagatgcttaattagacagagaagagcgaggcagattctcatgatgtttaaacgtatttgattttctttctgtttattttttccttttttcttttgcaaattctgtcatagatggatagggttttagtaatattgccaatgcatgcattatgttttaaagattatacccacaagtagatattaagcatagctctagaatcccccaaaataaacatagctctctagaagagcacagccaactttgtgcacaagtcaatattgaattgaagaacccattatgcgcaggataaacatacaccctgttataacttattactccctcctttcctaaatatgtgacaccgttgacttttttaaacatgtttgaccgttcgttttattcaaaaaattttgttatatgtgtaaaactatatgtatacataaaagtatatttaacaacaaattaaatgatagaaaaagaattaacagttttttgaataagacgaatggtcaaacatttttaaaaaagtcaacggcgtcaaacattttggaatggaggtagtattttgcaaaaatggttgatgagacagagtagatatactgatgggacaaaccatattttccaaatgagacgtaagtacgtaacgacgtacgtaccaacaagcataactggatcatccgcagattaacaaaaccagttagctacttcctccgttcaataatataacaactttatactggataggacatttcattattcaacaacagaagaatatccagatttattatcctataaaatatcctatccagtataaggttgctatattatgggattgagggagtagtagctatacttcctctacttacatatgtgctgtggtattcgccggtaaattaatatttcatggaggcatggaacagataaagttcgtcaatatattctagccaccaactctcttcttgacgtgatgagatatctccttaattatatgatcgatcggtttgcattcatgcgtgcagcatgcactctaggggctctactgatgggactcttaggtagctcaattagctttcacctgccgaccaagatcagaaagccacttgcgtgcaagctgtggccgactagcactaataggcccaacaacggtagaaagtagaaacaaacgaggaaaatgcatatactttcttcgtaaaaaaaaaatacatttataagttaaactatattaagttaagtttgtgcaaatcttatcgataaattaatattaacatctatcacgccaaaagaactattaaatgctcccttcgtttcagattatacttccttcgtccctaaatatttaaatatttgatgccgtgaacttttttaaacatgtttgatcgttcatcttattcaaaaacttccagtttgaatttgtcaaaaacgacttaaaatctgaaacggagggagtatattttatagtgtggatctaataatgctcatattaatttatttttatctattagtgtagtcaaacttgaaatagtttcacataggaagaaattaaaagcaaaaaatatattaactttattccaaaataaataaactcggtatagaatgtgacacatttcagatttataataataaaatatgccgttttgtataataagtttgtttattttagaaggatggagtagctctattatggacggaagcagtactaccggattgcatgcgtagtatgtaatccctctatttcaaaatataaacaactatttttctccaatgtttcataatataagacatgtatgcatgcatgtaattaattagcacatctactctactaaattattatttctttaactcattaactctcaagatctctaatattctattgggtggatacattcaaacaatgatgtgataattaataattatttcttatagttattgggttaagggtggctatgctttatatcttgttacaggggaagtaatatgtttgctcgtgtcgatggtaaattaatgaagggacaaacaagcaaacaagactggccacagcttgcgatcaatctagtggttaggctaggcaagcacagggattagccctcatatcacatcctaggacgctgtacgtacacgtcgcttctccgaaggtagcagacagcaaagcttatagcacacggtaaagagcttacagtatgtggtttggggcaataaccagtgaggtgaccaaatcaccccccacagtaatgtttccaacgcttccattctatgccttttctctccgtaacccataacaagtcgatatgcattatattacaaccacagctaccacggagaactatagcagtgccatcccagttccaaaatggcaatagtggcacaacatatgcggcacttatgaagaagtttcactggcagagaaatcttttttactcccggttaggaacccctttagtctcgggtttctaactggagtagcaatccaggatttaagatactcatctttagtcccggttggtgttaccaactggaactaaagagaggatagcgagttttttttcttttttattttctcccgaatctgagaggtatgcatatcccaaatcaaacccccaatcctcaaatcaaagtaaaatcccaagtccacatcacaaatctttatgttacttatacacacagatcaaatacatcacaaatcctaaaaaaaattacgcacaaatcaaattacatcacaagttctacaaaattcattgcaaatacatcacaagttcacatcacacacaaatcaaattcatcacaagatcatgcaatagatcacaaattctaaaaaaaaaacagcagaggagccggccggccgctaccgcctcccctccgtgccggccagccggccaccgccgcgccggccgcccgctgccgcacagccctccgcgccgctgcccgccgccgcaccgcctcccctccgccgaacggccaccgccgcgcagccctctgcgtgatgcccgacgccgcggcaccgcgtggccctcctcgtagctgtccgccgccgcgccgcctcccctccgcgccggccggccaccgccacacggccctctgtgccgccgcgccggccgccgcccggcccgctctcactccgatccaagcggtcagccgctctcgctccgatcctgaagaaaaaagaagagataaggatagggagttagagaggaaaaaggagatagagagagagtttgttgtgtggacgggaaaagaggacaagtaatagggattatatagtacgtgtagatttttattcccggttagtaacaccaaccgggaataaagttaggtctttagtcccggttggtgtatcctagccacctggcacggtctgacatggagacaatcaggactaaaaattatctttagtcctggttggtaaccccaactgggaataaagatcatctagtccggttgcgcttataaaccgggactaaaaatcgtttttagtcccggtttttaatggaaccgggattattgtggatttgggtcaaccgaccaaagatggtttctccgcaagtgttttatcaatgcaggacttgaaaaccggaactgatggttttacaggtgaaagaaaaagctctagctcgaatcgagccgagcttcaagacgatcagcacaaatcaatacagatcaacattcaacagcatagcaaatcgaacccatccaatatcattaattgatcaagaccatccacggaacatctgaaataatgttcagaagttttcaccacatcaacaacataatcgattaaaaatttacacaaaaatgtaaatttacacatcgttaagttatccatgacacatctcgtacgttacagataaaatagaagcacaaatcatgaacttaccttgcggcatctgtacattgaaggagagggagtattgtgccacatgcgccaccacatctgcactaggaagagagagatccacttgacccatacgtgcacaacaccggatctattgtccccgaactagcgtgcctgtgagggtgtaaagctcgaggccttcaccgtcattagtgtcttcctacttaagctcggcggtgggtggcgggagtcaaccctagagttcttggtggatggatctagaaatcccctagattagggcacctggatcaagccacccctaagctcttggcagctcgatccaacaacccctatccagatgatgagatgcatgagagagggaaattaaggatggcactgctccacacaagggagacaaagaggtcaccatccttttgctggggagaagggtgagggcgctatcgtccaactgggagtgaggggatctgagtgagagaccaagagtgacagatagcatatgtcagcacaacatggttttctacgacaggtcaaataaaaagcaccactaaagtatttactgttggttcaactagaaaacctataatgatgtggttatcagtgttggtttttcccccttccaatggacagacatccatgggcaggaaaccactatctatatgtgccggttttgacctaaccagtaataatggggcatcatggatgagttatgtggtcgtgaattattgatttgccaaggtgcacagacagatgaaaccctatgttggagaacgaaggtgatgtacatagtcattgtggatattttacaatttaaccccttttaagaaattattttcgatatagacccataaagtaacgtattctagatatggatcctaagcttggcactagaatgggttggagctgagagacaacatgatggcaccaaggaccctggtagcgagatcttagcccctatatatggccaaacagtcatgttggctaatgatgtggtccatatttggtgccaatttcacttgagctaagggttcgcacaatagccatttgcgctgacctctggcagtactaggccccctatctctgcttagcgcagatgctgaggtattggaggtcaaggtgaggtcctgccttggagtgagttttcgtgccaaggtggtgatggtgggcacgagggtcgatgccactgataccttaaacctcgatgccactgtaccaattttgagctaggggtctatatctacaataagtttttataaggatatatgtctaaaataatttttcaatgggctaaaatgaaagtaatctagatgattgttcgaagaaggtgttctccttcgcctcctccttcacactgctcaccactggctataagagaccatcgtagatgaggggctggtggagatgagtggacggcagagacgagagccggcaaatctgtggtcatcaccttcctgtcgtcgttgaccccttcccaccttgttgacaatggtggcaagctgttcatgaagagctcgaggcccgatcatgccgcctcaagatccgggcactcacctcaactcctcatcgtcatccctctctccaccagccactagatctagagtggctgaagacgagctcatcatagctagatctagagctagtggccactcaatctagctattgtgatggcggtgaccaaaaggaccgcaacagcagtgagaagaggggcgaatcagcgagaagatgacaagttgatggtggtgaacggtgatgagggtgaggcaccgggggcctctcctttttttttctgctctatcattctaatggcattaatatctgatcatgatctgatttaatttatgtatatatgtgataatttactcccattttattaatattctgtagctttaatatgtgtctaactctctatggtccatacatttatccctgatttagtgtgttcatgtatctatccttgaccttcctcgcttgacttttgttaaggggacattttcttttatgaaacagtgggacagaggtcattgggattgagcacatttctaggtgtctgaatgtatatgctgtaggtatggcggtgattgcgtatgtcggtatttggtgtaatgggaaaacttttctatgtcatgtacaaagtccaaacattaatgcatcctggattgtttaaccatgaagtgaccagggtttgtcatatctaaaagtctttcaacccatatttaaatcaaaattaccccctcaaaaaaaatatttaaaccaaaatttataggcatgcacatgttctcttccagtttctgataggcatgctgtgtgctagcgagtagagcaaataacgttttctaagctaggaagttaaaaacagatacggtactacattaattctataccttaaaaatgttcgaggtaccttaaagtaacataaaaaaggttgtatctctcggtaccctcttaagtacatacagtataatcactccaatcaaatcttggtaaagcaatacagaggcaaaaggatttccacccaagaaaaaattagtaaatctatagaaaattaaaccgataagaaaaataagcaaataaatcatactaataattcaactaagttacataaaatcacatacaactcaattagtgttgcagatttaggttgaaattaattttcaatctaaagagatgacagaggtgatgcattttgatgcaaataaatagtttggggtcaagattaacatgggttgaggctcgtagtatagcacactcttcgattacatggagaacgcacatgcacacatcatactcagacacatgtaaatacgtcaacgaagagcagtaaatccctagtgtcactaaaattccattgaaaacacctccctatgagtatgaatatctttgggaccaaaaattttaaatctgataggtggagtttccattcacaattccatcgtcacatcaaagtgcttccacatagagctcattctcttcatcgtccatgagttgtagctttgaccaagtacttccatgtagtaggacgttgaatcggttctactctttgctgccataaacgtacactactatagaatatgtaaatggtgccagttgggaaaccctcttaagtgctaaaccggcacccggttggcggcactgatgaccgaggcggttttaaccggcacctttgaggcgcccatgagccaaaaaaacggctcgatgcattgagccgtcaagccgatcccatctactacccaaatcccaaaattttctcaaatcctcataaattacattcatcaagaacacccatcaacatcacattcatcaagaacactcatcaagaacagatcaacatcatattcaaacacattcatcaagaatgctcatcatgaatcggaaggagaggagggcgtcactgccttcaccagcaccgctactaccgccactaacgtctccacagccgccattgtcgttggatggagaggaggggagcgccgctgccgcggcaccaccatcgccacctccactgccgcctcccctcacgccaccgacctgtcaccgccctatccccttccgccgatgggccgccgccgccacctcccctcccaccagatctagcggaggggagggcgccgctgcggggccgtcagaccaccgccgcttcccctcatgtcgtcgacccgctgccgtagcagcagtattccctcccatcgtcgcatgccgattcggtggagaaagaaaaaagagagagctgagagagagagagagacgactcggtggacgagtgtcacgccctgaagttcccctcccttgctctaaattcataaaataaatcgtccgaagaaattgtttaatttaacctagagttgaatccctaattaataaatgcaaataataatcggaattggcatgtggaatttttcttgagttctacatgtcaaaatatgctaacaggatttttagtggaattttcagagccttggaaataattttaaccaattaaaataagcaaagtgcaatattaaatccctgggaaaatcctttttcctttttatcttttcttttccctcctttttcctttttcttgggccgtcggcccagtccattcacctcccgcgccggccttccctcggctgggccggcccaagctggttcctccctcctcccaaacccctccgggtcaccgacatgcgggccccactggtcagcggcacaaggggagagggaggggtactggcaggcggggcccaccgggcagtggcacaaggcgggaggggcgcggctggtggctcggctcggcttcaagccggccggccggttatggcgagggcggcggcgcgcgcgcacggttgccagcgacggcaactggcgacgggaggcggcggcggacggcgcaaagacggcggcggcggccgaagcggcggcgcgagcgaccctagcggcggcgctacacggcgggcggcgcggcaaagggagagagaggaagagagggagaccgattctcaccgaggggctcggccggcgcgagggaggagcgacggcgaacggcaacgacgagagacgggaggatgacggcgacgggctccgggaggacctagagaaaaggttgggaggggttagagagagggaggcggtccatggcgcacgacataaccgatcgaaggcggcggcaatggtggaagctcaccggagtgcgaggagatgcgagctccggcgatggaattggacgggagaacagcggacgaggtggacctcgggatggcggacgcggcggtgccgatggcggggtgcggcggcgaccctagcgactgctagaggcggccggagcggtggagatggtggcggcgggtgggtgcacggtgctagggcgatagggagctcgggagcggacggcgaaagagggaaaaaggtggagagaggcgcggtggtcggttatatagaggtggggaggccggacgtggccgggagcggcggttccgcggcgacgacgtggagaggtggaggaggagagagagggggagaggattcaaatcgaatcccgccctctcgagcgcgcgcacgggccgggagatgcggggagagggcggcgacgtgggcgtgcggtacgggcggagtgggcacgggaaacggggaaaccggcggcgtcggtggcggtttcggcggcggccggcttggggagcggcggcgggagttggaagaaggggccgacaggtgggccccacctgtcggtgacccggaggggtttgggaggagggaggaaccagcttgggccggcccagccgagggaaggccggcgcgggaggtgaatggactgggccgacggcccaagaaaaaggaaaaaggagggaaaagaaaagataaaaaggaaaaaggattttcccagggatttaatattgcactttgcttattttaattggttaaaattatttccaaggctctgaaaattccactaaaaatcctgttagcatattttgacatgtagaactcaagaaaaattccacatgccaattccgattattatttgcatttattaattagggattcaactctaggttaaattaaacaatttcttcggacgatttattttatgaatttagagcaagggaggggaacttcagggcgtgacaaacctaccccccttaaacggaatctcgaccccgagattcggaagagctggcgaagaggtgcggatgggcggccttcaattcatcttctctttcccaggtggcctcctcttccgagtggtggctccactgaactttgcaaaacctgatcaccttgtttctggtccttctctcactggtctcgaggatacgaatcggcttctccacataagtcagatcttcctggatgtcaatgtgctctgagctagcttgttcctcaggtaccctcaaacacttcttcaattgagatacatgaaacacatcgtggattccaaccatattagatgggagctcaagctggtaagcgacttcacctctgcgttccaagatcctgtatggttccacaaagcgtggtgccaacttgcctttggtttggaagcggtgtactccccgaagcggagtgacacgaagatacacgtaatctcctgcctcaaaagtgagctcccttcgacggttatccgcgtagctcttctgtcgagactgggcaattcgcagtctttccctgacggtcctaactttctcctctgcttcggttaacacttctgtcccaaacagttggcgctcacctgtttgatcccagaagagtggcgtacgacacttccggccatacaatgcttcaaacggtgccatttgcaaactggcctgatagctgttgttgtaagagaattccgcatacggtagacttttatcccaggctccaccaaagtcaagtgcacaagctctcaacatatcttccaagatttgatttactcgctcggtctgaccatctgtttgcggatgataagccgtgctgaaattcaaacgagtccccaattcttcttgcagtttctgccagaactttgaagtgaattgacttcctcgatcagatacaatcttcttaggtaccccatgcaaacacatgattcttgaaagataaagctctgccaaccttttcccagtataggtagtgtgtactggaataaaatgagcaactttcgtgagtcgatccacgaccacccagattgaatcgtgccccgacgatgtcctgggcaaacctgttatgaaatccattccgatttcttcccatttccattccgggatctgaaggggttgtagcaatcctgcgggcctctgatgttctgctttgactcgctgacaaacatcgcagagtgcgacgaattcggctatctctcttctcatgctgacccaccagaatttctctttgaggtcctggtacattttagtactgccgggatgaattgaatactgagtttgatgagcttctgtgagtatgagatccttcagttctttgtcgtcaggcacacacaatctttctcccaaccagattgtgccatgctcatcctcatggaaatctcgggcttttccgaccctcatattctttttcagctcagctatttcaggatcatttacctgagcagctctgacttgatccacgagcgtaggccatgcctctagggcagctacgtgcccgtgttctacgatgcccaaatttaggtgctcaagatcttgctgcaatttgtcacacatgccttcggtacacactgcattgcaatagctctttctgctcagagcatctgctaccacatttgctttgcctggatgatagtgtatccccatgtcataatctttaattaactccagccatcttcgctgtcggagatttaagtcgggctgggtgaagatgtacttcaggctcttatgatcagtgtaaacttcacagcggttgccaataagatagtgccgccagattttcagagcatgaaccactgctgccaactcaaggtcatgagtgggataattggtctcatgtggacgcaactgtcgcgaagcatatgcgaccactctgccttcttgcatcaacacacatcccaatccttggcgagatgcatcacagtagacttggaagtcttttgtctgatctggcaaaattagaactggtgcagagactaacctcttcttgagttcttcaaaactttggttgcactcagctgaccacttgaatttttcatctttctttagcaactgtgtcatgggcctggcaatcttggagaaattttcgatgaaccgacggtaatagcccgcaagtccaagaaaactccggatctgagaaactgtctttggtggggtccactttgtaactgattccacatttgatggatccactgccacgtcttgagcagaaatgacgtgacccagaaatttgacctccgataaccagaagtcacacttgctaaacttggcatataactggtgctccttcaatttctcgagtaccagacgaagatgttgctcatgttgtttttcagactttgaatagataagtatgtcgtcaatgaacaccacgacaaacttgtcaagaaactccataaacactttgttcatcaagttcatgaaaaaagccggtgcattggtgagtccaaatgacataaccgtgcactcaaacaacccataccgagtggtgaaggctgtcttgggaatatcctcttcccgaattctcaactgatgatagcctgatcgcaggtctatcttggaaaacaccttagctccttttagctgatcaaacaggtcatcaattcttggcaacggatatttgttcttgattgtgacctcattaagggcgcgataatccacgcacatcctcttggtcttgtctttcttctccacaaagataaccggagcaccccaaggtgaagtactcggtcggatgtaccctttctgcagctgttcgtcaacctgcttcttgacctctgctagctcattagctaccattctgtacggcctcttgtaaattggagcagtcccgggtgccacatcgatccggaactcgatttctctcttcggtggcattgtagtgaggtcttctgggaacacctcaggatactcttgtactataggaatatcctccaacttcctgggactttactccactgtttctgtctgaccctcaatagcagcctgattcagactcgctacggacttctgcgacgctggggaacggaaggtgatcttctcccctttgtcgttgtttagggtgatggtgcggcttgcgcagtcaatcactcccttgtttctggtcaaccaatccattccgagaatgacatctaggtctttagattcgagaaggatgaggttggatagaaacggtgatcttttgatctctatagtcaccgaggggcaatagtgtgatgtcctcatgtcatttccaggggtatgaacctgcatcggtattttaagttccactaccgataatccatgtgtcccagcaaatcttttggaaatgaaagaatgcgaggcacctgaatcaaagagaactgttgctggatatgagttcactggaaacgtgcccaacacgacctctggtgctgcctgtgcttcctctgcagacacatgattggcgcgggcctggatgaacctgggtccaatgcgattcagcttcggacacttgccagcaaagtggccgtgcttgccacagttgaagcagtgtcctggctttcctacagcccccttcttgggttgttctgactgagctgacacagctggcggatctgactgagctggtgccattagtgggggtggagtcgagttgtggttgtgctgcttactgttgttgtgactgccaccgttgtaatcgttgttgaagttactagggtgatagggacggtgctgacagacgatcagggtggaaggcccacctagctgtcccgtcatgaagcgaggcttctgattgttcccctgaggaaagctgatctgagctgcctttctttttcggtccattttgttgcgttgctcttcctgacgaatagccttgtccacaagcttctcaaagtcctcataaaccccggagattagctggttggtcaattcatcgtcgagcccaaacaaaaacttctcctgcttctcagcatcggtgcgcacgtcatcaggagcgtagcgcgcaaggcggttgaactcgtgcaggtactctgtaaccgttctggttccttgttgcaatgcacggaactctctcttctgttgtgccataatcccttcaggaatctgtgccttcctaaagctttgacaaaactctgcccaagtaacctccgttgcatctggacgggtcaccacgtagttatcccaccaggcagaagcaggaccttgcaattgatgtgtagcaaaagcaaccttctctcggtcgttgcattgcagaaggttcaacttcttctcaatagcacggagccagtcattggcctccattgggttggtggtgcttgagaaagtaggttgctggatgcggagaaagtctaacagtttggacaggtgtgatggtggaggagcaaaccgctggttctgttgcgcctgctgcaacatctgatggtaatgttgctgcatctattgcatcatcattgtcatcatctgagtgactgttgggttctcgggcggcggagatgaactgctgccaggtgcaccactggtatgagcttcatctgtctgctcttcgctgccactggcgccgttggagtcacggggatcattccttgtcttcaccatctggaggggataggtagaaataagagaaaggaagaaaacagacggctcggaaactaatctttcttataaaattaagtgccattatcttaatcttgattaaaacactgaaaaagaggcacacaattcctaattaaggctgtcataccactcacacctgatatcgaccgccgactaacccacaagcaacaaacctaaacacaaaaactagcacgcaaacagactaagaagacgataaagctaagggcggcgactctgaagctcggagcggcgcttgcgatcgaagaacatgtctgacttctaaggtagacaagggataggaatcaatgcatgctcaaatccaaatttaaaccaagcaacaaatggcccaaacaactagccaagcatgatgatttttatgcatagaacatttttcatgaacccggataaagacactaatgcgactgactaaactatagcttaatgcataaactagatgcatgaaaaatgatgcgcgtaacattgccccatcgaacatagacacgacctaatgcatatcacccgataaattcccaactgactgtcaaataaactccaaataaacttttaccaaaccctagactgtccctagtcgagaaatccaattaaataagcgaccaagatttttcccacaaactcaaaagaacaaaaccccaaaatttttcccgaaacaaatccaagtgcaaaaagcatatgcagatgaaaaggtttcagagggctcttagggtttccatttggcttgtcctacggtcaaggtcggctctgataccaacttgtcacgcccagaaattcacgaaccagaatttctaagctgaatgtgtattaaacccctgtccaggaccaccaagggtacacaaacgacaattgttgacatacagatccacgtcttacaaaaatataaaagattacaaatgcagcggaaaaagagaaaagcgagctaagcctgaagacttgactgctgcagcgggcgactccattccacaggcatccttgacggcagcgacgaaaccaacctcttcgagacatcttcaactgagaaggacttcaactctggtgtgggggaaaagagagcaagactgagtactacccactgtactcagcaagtcataccggaagaggaggtatgatgcaagatatatccaagggaggctaaaggttcttttgcataaagccggcatttcaaagcagtagttgaaagcagtaaaacagttgtagtaattaatccatattaaccaatcactgtccaacgttacaccccgttgcaacaggcccaaaccaccacctgaactaatcagttcattaagctaaactagggtgaaactaatcacggtgaatctggtcgaccgcccataaccgtgggcacggctattcgaatagttttactctgatcagaggtgtacaactgtacccacaagacacagccccacgacacgttcccgtgcgccgacatgccaccacgacataccggaaagaggccgtgacaggacccttcgcataaccccctctaaccgatcgcaccacaccttagggttcgcccccgtccccagcaggcaacgggcagcccccctttcgtgccgcggtgaatccggaagccgatcaaccggacaccccggccgacccaactccatcacgcccaccctcgcctgggtacgtcggctagagaaaagctacactacaagcccagccgttgcccacgctggcttgtggtaagtacgataaattcttccagggcatcccgcgaaccggtccttaatcgccatgggcacgtctagcaaaaccatgcacccacagcccaccatgtagtgtattttaattagccaacaccattgcggtggcactaatccaaagctattgccaataatcaagtctatgctttaatgtggtccccttttgtgcactagttgaactaagcatggctaagcatctcctaaaccaacatctagtcattttaatacccaagttatcaatggcataagggaaacaacatatagctgagtaataggacccatcccacatgatattgtaaaacaatgcaatatttaatagaaatgcgggacatttgtaaattaggtacaatatgatcaattgcaatgtatgacttgccttgctctcgcactgatgagaccacagcaacgtcttcgagcaaccacgaatcgacgaaacggccgaaatctacgcgacaaacaaagcacacaagcaaaacatgctataagactactgaaacaggaaacaaaaccatttttaatggattctacacatttttcttgatttactgagacttgaatggacttaaacggagctcggatgaattagttatgatttttagaagattatctgtgtttttactaataaagaaaaacccttaatcaatttattgcgcaataattcatcccagggctgacgtcagcaaggggtggggcggcgccgacatgcgggccccactggtcagcggcacaaggggagagggaggggtactggcaggcggggcccaccgggcagtggcacanggcttgaggggcgcggctggtggctcggctcggcttcaagccgtgcggccgattatggtgagggcggcggcgcgcgctcacggttgccagcgacggcaactggcgacgggaggcggcggcggacggcgcaaagaccgcggcggcggccgaagcggcggcgcgagcgaccctagcggcggcgctacacggcgggcggcgcggcaaagggagagagaggaagagagggagaccgattctcaccgaggggctcggccggcgcgagggaggagcgacggcgaacggcaacgacgagagacgggaggatgacggcgacgggctccgggaggacctagagaaaaggttgggaggggttagagagagggaggcggtccatggcgcacgacataaccgatcgaaggcggcggcaatggtggaagctcaccggagtgcgaggagatgcgagctccggcgatggaattggacgggagaacagcggacgaggtggacctcgggatggcggacgcggcggtgccgatggcggggtgcggcggcgaccctagcgactgctagaggcggccggagcggtggagatggtggcggcgggtgggtgcacggtgctagggcgatagggagctcgggagcggacggcgaaagagggaaaaaggtggagagaggcgcggtggtcggttatatagaggtggggaggccggacgtggccgggagcggcggttccgcggcgacgacgtggagaggtggaggaggagagagagggggagaggattcaaatcgaatcccgccctctcgagcgcgcgcacgggccgggagatgcggggagagggcggcgacgtgggcgtgcggtacgggcggagtgggcgcgggaaacggggaaaccggcggcgtcggtggcggtttcggcggcggccggcttggggagcggcggcgggagttggaagaaggggccgacaggtgggccccacctgtcggtgacccggaggggtttgggaggagggaggaaccagcttgggccggcccagctgagggaaggccggcgcgggaggtgaatggactgggccgacggcccaagaaaaaggaaaaaggagggaaaagaaaagataaaaaggaaaaaggattttcccagggatttaatattgcactttgcttattttaattggttaaaattatttccaaggctctgaaaattccactaaaaatcctgttagcatattttgacatgtagaactcaagaaaaattccacatgccaattccgattattatttgcatttattaattagggattcaactctaggttaaattaaacaatttcttcggacgatttattttatgaatttagagcaagggaggggaacttcagggcgtgacaacgagccaatggggaatggataacgagaggagacgagaggataagatgtggccagaggttggttcggctcggctcgtttggtagggtgtcgaatttttttaaaaaaccggcacaaaatataataggtgccggtttttatttagaaccgacaactatagttacttaaaggtgccattttttacgatttcaacccacggaggtgggaaaatgtctattggtgccggttttaggactaccggcacctgcagtgacgacatcttatttgatgttttgtagtagtggtaaataatactcggcatagcactgaagtattgcacacgcgaaatgagcgtagttcaactggttaaatttcttgtggtgtatccaccccacccaccggattcaaatcaaagaattgacgtaggtgcttgtacttacagttaattatattttcagtggtaggcgacgtacccattgatagtgagacgcctgtagtcactccgtcaatctcaagatataccgacctagcatatgccagtccagtcttccggatgtgcttatatgggtagggtgtacgtgcgtgcgtttacagggagtatacgcgtgttatgaccgtctaccttagtactatgtttctaaagaaaaaaagtattgcacagagtaatcccatttatcaaagggaacgacaacccgaggtgatatttataaagagaaaagaaaacacaagatcactttttactttgtaagccttcttaaaatttttgctttgtactgtaccaacagatgcgcctcaatctcaatgaagcacacccagttgaccgcgtcagaacacattaaattattccatggccctataaatatattgtatcataatataaggggttttaaccttttgctcgtactatttcaccactcgtcttattcaaaaaaatttttgcaaatataaaaaaaatgaaaaattgtgcttaaagtactttagataataaattaagtcacaaataaaataaataataattctaaaattttttgaataagacaaatgatcaaacagtataagcaaaaagtcaaaatcccttgtattatgggacggaggaagtatatgtttcggatctgctaaatggttcacaagagaaacgagggggggtgaaatcttacacattctcagctggtggtggtttcagattccaatcgatgactcaacgcgggagtggtttgttgatagaattttatgaaaccatggaacatttaatatttgggattgggtcccacccatcttgactatgtttgccgtctcgtggtcttaggctgtgtttagttcagcgcaaagtttggattttggttgaaattaaagatgatgtgactgaaaaattgggtgtgtatgacaggctgatgtgatggaaaaaaactgaagtttggatccaaactttggatctaaacacagccttagtacacacaggaaaagaagacgccgggaggaagaagcagcagcgttgaagccagcacaaaaaccacagatccagagcccggagagcaggacagcctcagccttctcagcttcggatcgctatttgctaatccatcgttaaccatctcgtaggacgtaagttaattatcctgtgaccctgtccttaccgctctctctgtggttgcttcttcgtattgtaattaacctgcatctccgaaaagaaacgtacatctgcatgtgcacgactgcatatatctatctgctctgtgttgagtgttcaccgtataagttttgcttgtcctgtcctgtatatatttcatactgattcatacgaaatcatgtgcatttcctgcttcccccaaatgtggctttatgattggtagcaaaaatatgtgtttccctgtctcattaagaaccaacattttgttgcaatgaaagagacagagatgtccgaggaggagcactacaaccgtcaaccgacgaggagtacaataggtcgtcgcaagcggtcggatgtttgggatcattttgagcaaaaggcagagtgcaagtgttgcaaggcgctgctctgcgccgacaagaagcactacgaggttacctgccccgtgaggcatcctaagagaagggtaataatacagctagctgcttacttatagtctatctatcagctcactcatataatggttagctcttcactataaatatatggtccacatgtctgtctcacagattttcttggttcctgtgcctaagcaggctgtaaacttacagcccgcttctcatctctctcctcttttctctcatccacctcagcattcagccttcttatagcccactattatacttgctctaacaaggctagtaggcgtggacgaggtagagagcatcgtggctcgcctgcagctcgattgtccatggacatatgacacggaatggtatgcgtactattatgcgctggaaatcattcatgatgagtgctcttctgcaccagcaaaaattgcagccttagcaggaaatgtcatatttcatgagacaccgattactgacctgctacgcactgcattaggaacatcatacaatgccatgagaacaatgtcagcatgcatcaagctctccgacttcaaacctgtggctcatagaaatgctgaatctgagaaaactgttagcttctgtatacgactatgatttaggaaggaatgagcatacggttctaaagatgaatatgacctaggtgctcttcattctgcatcgagggaagtgtacgaaatgttggaaagttcttatttgcattgagagctttctcatgtatgctcctctcggtgcagatgccatttctaaggtaggggaagtgtttcgccagctcttcacggagtataccaatcaggtcatcactgagacagagaacactaatcaaagcaacggtatggagcgagctaatcatgtcaacgaaatggatgtgtcacaacaactcgtggagcaggataatatgaactcacagaaaagctcgacagaactcaacgattacctgcaagatgagacggtcccgatggatcaaaaggattttgatattcttaagtggtggaaggacaactgtcaccggtatccgacagtagcaagaatggcaagggtttcctggccattccagcttgcactattccatctcctcagttgatgatcgagatcacaaaccaccttcgccgttatgtatgacacttctacggtacgtatggctatgcatttgctatagctcaattaccagctcttatgtcacctgagtttggttgtatcaactcatatcatattttgttttatttctgaaaagtctacctttttatgtgctcttttaatttcgtcgcatctcatattcttgcatggctgataatatggatgttaatccccttattatgtatgttacattcgcctcataaactgctatagcacacgtatactcttctctctttatgttggagacattgcaaatatcaaaattcaccagtaatttccgaagtaatttatgcatacaattctcgtccatgaatcaaccgagctacacaaattaacaatttaatatacgagtataaatcggtggtgagcttttggcggaggaggtcctcgggtggacggtggtgacgatgttcgagcggcttgggacagcaacgaagctttctcttcttgcaaacccaatggtggcgacgacgaccttcggctgcaattggaacggcggcgcggctcgattggaagcgtagtagattgggttcatggtaaccgtgataatccggtggctgccaggttttgtttattcggtgcagtcccaatggagaagatggcgctaaacggcaatccagatttgatggaggaaggctgtggctttgggcggcattgagtggagctgggactcccgtccgagcttgaagttgacactaacatatggggtccgggccgatatgtcagcgggaggatagaggtggcgcaaacagcctggtgggctgatggctcgtgtcggcttgggctagcgtggaggagggaagcaaattagactttgtgagagagggagaagaggcggacttacgagcgggactgggcaagctggcccaagagggagaggaggcagacaagaaagagagggaaagggagatggaaaaggaggaatgtgccaaaattggccggagcttatggagggcttttaattactttttcatttaaataattgctgaaatgatgattgtatttttaaaattagcaattgagctatgaaaattctgaacaaatttcatggagtgtaattaaccatggagaatttaataagaattaaatctagccatgttatacttaggaaattttatttcccacatttaattttcttgtagattaattgaacattaatataaattctagaaataatttattaaataatttataaatccttgaaacgaaatcagcgtatgacaactagtctatgagtatactgggtaatatgattgaaaagcaaagaaactagtggaacctatgtgttttcttctagtctaaattaaaaatgtacatgtatcatatagatacctgtatgcaaacacaaaatagtaacgagaactttatcttttaacctttccttcaatcataactccaagatcatcaagaagtgttcttaccacatataatcgtggcagcaacatttatcaggatgatagaagatatgtactgtgctagatcttgaaactctagaatgatttctaacactccaagagatttagttcgatcaggaccggccctggggcagtgcgaagtgcgaccgcactgggcctccaaaatatgtatactatggtacaaagtctgatagactactttgtgcattgagaagaatactgctagatgagattgttattgacactatcatcactgattttgcatctagaactgttagaagaaattgttttaaataatctagagatatttctttttggtattttaaacttattagcgtgaaattcgtcaacgacaatgagtttttaaatattatcttgtatttttatggtgaatgggggccttcatttttgtttcgtactgggccaccaaaaagtcagggccggccctaagttcgattgcaaaaccacctatagatcttccatcatcctgacaacctactcaatctgcatcagtataaaagcacttaatactttgttatggccggaacttatggtatattatatcagtcaccactcactggaataaggtgaactcaagcaagaaacgatcccaacaatggcgtgcaaccaattctgcctcttttttttttcattgattaatgcttgggaattgctagtttactgctttgcacagtgttggtgaccgtggatttcattcacttggattaaaagagtaacaaaaactatggttagagttatactttcattatctaaaaagctcattctgtgtacatattgtaaatcgatcagtgaaatttgtactccatcttttgctagcgtcaaaccgtactgtaatgcttttaccgtataaaaaagagaaggaaaagaaaaacttcaacaatgcaggaaacattacgtgtcgtgttaaaattctagggattctaaaaaccataggtggttaacctgtgccatgagccaacttggtgtattagatagtgtaatccaagtttaagctattgatatgtaccggattaaggtgtcctactgctatctataaagcccaaatagtttgatcagtaatgagaaatataaattggaacctcgtgacggccagataaagaatattctgtgttaaccaggaaattctgtgttaataaatctcttttttttttggactctgttgatgcggacattagtcgtggcaactgataatgacacctaaaatccccggggaaaaaaaaagaagataataacacctaaaagcatattcttgagaatccaaagagcatattcctgatgatcaaaagagcacattagattatccaaaggggtaatctgcaattagcaaatttctcgattgtcctaatttgcaaatctgaccagacggatgccacttcgaggcgttaggtgtgtttcggaacgcgctccttatgctaattcacaagccaagcattttgaatccccgcaaatttcagacaagaaacagatcaaacaacacagcggccaaaactgctagccaagcaaaacatcttcaaaacacttaatttatgattcagactgatacagatcaacttgtaaatacaggtcttctatatacaaatgcttgctgaggttacaaacagaaatacaaacttcacgatttgtgaatagacttttcgagctcagacaatacaagttagaggtgtcagatgaaaatcgacatacgattttcgtcatcttcttcgctcggactgctccctcaagaatggatgcctaagcgcctcttgtgctgttaggcggctagctggatcataccttaacagaccttgcaaaaggtcaatgaactcgcccccagaatgatctacattttgcatcaccagattctgcatgaagaataaagcaatcagattcatgtatcaaacataatagacgatgaatgtattaacttgatatggaaatcatacctgaagacgtggcagcttcataacagctttcatgctatcccgtgacgcacaaccttcaggccagtttaaacggccttttctgacatatttctcggaatgccggctacatacaagcaacaaatgagcacacaatacctactaatccccaatgctgtgaatgcttactgacaatgagacggatcaaggacagcaacatactctgcccttttgagcatgtgacatggcaaaggaccaaataccctctccatcatagcaagatgctccaagttttcatgggtctgaaacaatgcttctccctgcggtagctttcgtaactcaaaaatcctgctgttgttgtgatagaatacaaaccaaatattgcacccaacaacataccgtgcatagctcaaccagtatacaaccaacactccatatatcacaggggtaactccatccaagtcctgaacagaacaacagccattccaatcgtaaacataaaccataatcacgctgacagggaaggctttgcactaggcaagacaaatacccaagataacttctggagctcgataatgcctagtagacaccacataggtctgatcctgctggtcatatgttgtgctgccaaaatcaatcaccttaatagcactggacttgggcagctgcttgaaataggaaccttcctttggagaacgggatgaaacctagcagagattgtagaaggattagaaagataacataaaattgttgaatcataatcagctaaaccgggtaaaaagaagacgttaaaaaggctaaaaggtcaaataggtagaagaacaaagtatactttgtaatcgggcactttaatgtactctggagaaacaagaagaatgttctcaggctttaaatcagtgtgaatgaggcgcaattcatgcataactgcaacacacattacagagaagataaatatataaacaaacaaagcaggttaggtattaggtattcctaaaaggatgaagcaaagaaagcatcagctatcaactgatgacagcatgcaatttatggaagaataatctagatctgctaattagtgtggtaataagagtaacagaaggaactgtgcacacacatgctatacattccaacagttgtttggcaacctcccgaactagggcaattgggaatgagcggtaactgtttttccgcagaaaatcatataagcttggtccaagcttctcacagacctgcccaccatccattcaaattcaccaatgtttaagcttcatggggttatctcttttggttagttcataattgccataatctaatgatgtacttacaatacagatatggttacgatagtcaaaccagttccgaatttgaacacaactgcaaaatagaccagcttatatatacaagcaatattgcgcaagtaaagcacacagatagatcaacagttacttaagggaaacggaaaagtgaaccataggactcacctggatctacttttttcatatttaccaagctgctcgagcatgccaatttctatcattgcagcatccctgtacttcttaatgcctctgatgatcttaatggccaccatttctttcctttccctatcccaacattccaatacctgaccaaaggtacctgatgtatatccaaaaagtttcagtttcaatatactccgctctgtcaacaaattcagcatgcaagaaacatctcaagttaagatgttcaattctaacggaggcagctctcccaactgaccttcacccatttttgcattaatcctgtctgcaaacattgaaaaagtatatgtcaaaaaaggttcacagcaatattataggaaaaactatacatgatacagctacatgttttaagttaaaatgtattcagtaattacatcgtggtgtgaggttgtctccaacagcaaagacaaagtgtccatccttgtcatcttctctcagaggaggggaagcaaaacgagggatttcctgggacgagagacccagcgtcacagcactgatgacatttgcaacttcttgcccacataaccctatctgaacctacaaatagtgcccaaaatttaattagataaactgctgcaacttatattctgcaacaaaattctgaatatttgattcactgaacttctacatgtatgtatagaaaaaaatattgcatatagatacagatccgctaatcaacaaatagtgcatactatatactatatataattaaacaacaaataaatctcaaaacagaacattcaataaacaataagtactagatataaagaaaagcaagattaactcgcgtgacgatttgacctgaaactctaaaaatctgtccaataacaggcagataacatacaacaaatcgatccataaatctgtgttcataatcaatccaagagcccatcatgcatgtatccaaaaaccgattaacctcgcccacgccaaaactagcaggaaactagttcaaataacctcacaatcctcctaatcctagaacataacacagaaatctggtcaaaccaaccacctaagagagagcaggtggctaatttccaccagatctactctcgcctcacctaccgagacgacccaaatcgacataataaccaagaaacacaactcaaaccgccgtaataataataacccgcaccagatcaacagatccgcgaggggaagatggacacgaggcgaccggatcggaggccaatacctggtggatctcggggccgacgtcccaccccagccgctgcctcttccgcgggcggcggtcggccagcggcgcgcgcggcatctcggccaagcactccatccctctcgatctctctctctcggctcggcctcggcgaatcgaaccagcggcggcggcgatcggagaatttttctctggattggatgtgatttgggggagggggagggcgaaccctagctgcgttgctttattgcggggaagggggatgagattaggtttgtggggaatcggagacggagacacgggcgctggagttaaggctgtttggttaccctgtgtcaccgactggtgggcccgaggagttgtggtgtgaaccgtggcccacgtgtcagtgagtgggtaagggaagggtggtgggtgaatgtggggatcggagacggagaaacgggggcggtggcgtgtgggcggttacgccctccgttactgacggtgggacccacggggttggggtggaagccgtggcccgcgtgtcagtgagtggtacgggaggtggtggtaggaggtttgggtgaaggtgggttggcgtgttcctttttctcgggtcgtgggccgctcgttttgtgggggttgctttttggtgagttgattcgagagagagcacgcggttttcgccatcgggttgtagttctccgatgctctgaggtttgggctttgctcgtgtttatttttcattttgtagtgtgtgataggagtagcagtataataaatctataacaatctataaataatataactactatatgctatatagtttgtattttataagaaaacagcaatgttagactagtcaaatcaacgctgcacaaaagatatattcctcctattcaactcatgcgtccctctcatctttcatcatcggtatcttagagtataaattaggggtcccattaattgtttaagatttattattaaccataatggtttattagtgattacaaattgatatgcgagtaaaaatttgtgtgtatatatgttcttcgcgacttaataaaactatgttaaaaaggcatcaaaatcaaattcaaaatcaagttttaaaatttaaatttggatttgacttataagccataaggcaaacaatgaaaccccaaaacatgatcaatttgctaaattttaaaacgtttaaaaaaggcgcatggcactaacgaaatccatttaaatctcaaatataaccacttatacattacattttaggaaaaggtccaaattaccccctcccctgcctaaactattgtgacggtacgaattcaaaaacatccttcaccctcaacatttcgtaccagacgaattacccccgactcacttcaaagtggttttggcgcacgaggcagtatagtcagcaacaaaaaacgagtcttacaaggtggatggagtagtggctgaggtagaatcaacgcatcgacagattgggctctgaggtggcgacaacggcagcggcatccacgacgaggttgatgtcataataagttgcttgagctcgatggaaccaggagatggtgaagaaaaagagagagatgatggaacgggagcatgatggagctagccaatggccatggctcccttcttctatgggggcggtgatgggggttcacattgatccaatagtcgcggatccgccaccaccagccttgggtgcggtgggcctcggcagtggctacaacgacgacagtggcatgctcgcatgacgacactgagctcatgatgcactctccttcgcctcctctctccctccacctctctgttcgcctccccctcttccatctggcactggatgagcttgatggaacaaggctgaggttgacatgcggtttgagtgagccgttgacggcagattgcagttcttctgaggtggacgaaatttagtcaatggccggtggatggtgggtgagcaacaagtagagatcgatggtgatcgagatgaggtagggaagagaagaccaagagaggaagaagcaaaactaacatgtgggctccacccccaccgcttttttagttctttatgctgactgaactgccacgtatgggtcacgtaggaccaaaaccactctagagtgatgtcatggggtaatccgtctggtatgaaaaatcgagtgggtaattcgaactttttcccaattttgagtttgattattcttatcatgggacatctccaaaaactaaactcaactataatatataacttgcttgcaaatatcttgcatactctttattccacccatgtcactttgtgctcgtaaacatatagcaataggaagacatgtcatctaaggctttgtttgattcagcttaggattattataatttggattattaggagtaagctaaaacaaacagatagcttattatgatatattattataatctataaaccagattactataatttggtaatccactctaaaggtgattttttagattattgggtggctaacaactagcaaacaactaataatccagataaacaaacatgtaacaacttattttatgtcggcttattataatccagcttatagtaatctagctcaataatctagattataataatgttaagctgaaacaaacatggcctaagtaattgatgaatgagagattacataacaatatgacccttgttcttttctgttgagtccttgggaattttatgaaaagaaaaggaaatggtataactttacacacttcacattgatgcttttattcctatcaaaagcatatgtcaatcatattgataaactttgtacatatgctgcttattatcattttgaattttgaatttactccatacacttatggttctccctccatttatccatgcaaaatgagacatgagctagaaaaaaaatgatgttgaaaaaaatgctcacagaggaaggacaaaatattctcaagcatgatgacaaaaacaaattctctccgtttctaaatatttgacaccattgactttttagcacatgtttgaccgttcgtcttttttaaaagcttttgtgaaatatataaaactatatgtctacataaaaatatatataacaatgaatcaaatgataggaaaaaaattaataattacttaaattttttgaataagacgaatggtcaatcatgtttagaaaagtcaacacatcaaatatttagaaacggagggagtagatgagatagaaagatatacatgttctccaaataagtactagctaggcttcatacctcatggtgccaccaattttggaccgttaggtcccatcgaatgaacgaatgatatttcgtatcacgagataccaccactccctagaaaacctatgtttgatgattgcacaattatgcagttgctttgcctttcaggctttaaacaaaatggtgggcagagtagtataattattgtggtgatagaagtgatgcagagattggccacttgtagagatgtgtcatacatacgtgtatgtacatatgtatggtgtccacaatcaagttggggggaagactaggcatatatttgctgaaagcctgaaaaagcagttgaaaagtgtagtctcccctgaaaagaaaaataaatgcaaaatgcaattctcaatgaagaagatagattattttagtgcacatttggatggatgtgggccgttgaacacataagatctaacgatagaaatttgttgctactgcatctagtatcggggtgtagtagtgtagggtcggtatttgttatgactacagaataatatgcaagcgcacaaataccgttgtagccattacctaagagtattccagggtatcgtatccacagggaacgtgtctgtacaatctaagaatgtgattcatccaagaacaacacctaaatggtaggctgaggatagataggattccaatgggttaattatcttaattaaggtaaaactctatcaattgctttaggcaccggcttaccccaggtttgctaaggagcctccggcgaacgtggaggattacgaaggacggacatgactgtcatcactagccgcctacctctgcgacccgtggagcacacaacaaataaaggtaacctatagcctagacaccacatcaatgctattaattactaccctaatctcggatccacatagaagattaaagtactctacctaagcagagtgatgaaccgcaacgatgagaatatattttactcaaataagaaaaataaatacctaatgagattatgaatacttataaaagaagcattcgtcaaggtacaagatcagggagagtgtcggcatctccggcactcatatgaaaccccagagagaactccgacatttgatgcactccttttggagctttctctcactttcttccaaccctactagagcaatggctaagtgtataagtgagttgtactcaacttgttggtgtaaaatggaagagagttgtactccacttgcgtgggggagtgggtttccgaaatttgggaaattttgaactgaaattgtattcactttcttcgacaaccatgaaacctgagccatttggttcttcgtaaagatcaatggagaagcgtggacatacgcaatggcaggtgcaaagcacctcctcaagatgacctcacatttgtaatcgtttttccttttccctagggcctgtaattttttccctctgtatcaaccgaatgggcatagtttgtaccgatttattaaaagaaatagagaatttcttgttgatttacatgatatgtttcatgaatcctaacatggacatagccagcacctgtcgtggtgatgatcctagctagctagttagctggctggcaagcctggcatgcatcaccttgtaccactagaaaaaactccaagaggtggcaaagtgtggacccccgttttcataacaggaatcaatcgtgtaaacagtaccatttccctggatcaagtagtctggtacacacgagttcatagctgaaataccaaatgctcatacacaagagtctagtacgaattattacaacataagcccgcagacattgtcttaaatcatcggactgagcggttcggaatacaaccaaaagcagaattagataaggcagcggaatttaggcagcggcatgccattgctacaggcaacgaccgtactaagacctattgggcaccatcgtcttcatctccctcctggtagtaggcatagggatcctccgaagcttcatctcccgcttctgattaattttatatttgcaagggtgaataccaaccgtactcagcaagccaccacagcaacaatgcatatgaaaggggtatttcaaaggatggctatggttcttttgcgcaaagccaattttgtaattcttttcacaagcctaagacctatcattgactgatcaaattttagtaccagtgtttgtatttaaacaacgacggttctgtccaccattcattgtgatcccaaggatagcttcccgccattgagtcgttatgattttctgaggacgtccactttcccccatctcaggaagtggctccaacagcataaaaattcatcatgcaacaacccatcccacacaagttaataatttagaggctagccaagtgtaatatatgtcccggtgctcaataaccgcgagcacggctattcgaatagatttggttttgctgacattgcagtggatgtacactttacccacactccgcgactgcccaacacatgagccttgtctcaacacatgagacgcgtcacggcaaagcttttcgataacctcgcattggcagtacccgctccatgaacttttcatcctcatgcactctaggcgtacacggtttctagcagtgagaggagttctggcgcacccgggaagggaagactcacacatgcattaagttataattatgattaaattctcacatggcagtcctaccgatggcgacaccactgtagacacccgcctcgcggttctaccaatggctgccccaccgtagagcccctgcctcacacatcaagaaaccactacgcatggatactgcctccgctcagctatctactccgctaggtctatacccatacgagaagtgcggttgtacgggggtcgtttcatgcttaacttcatggctcggtccttaactgaccagggacgacactagccttttccggacaccacccaaatcctccgtccgccccagtcgaaaacagttgtttaattttatttctcctttcacaaatcatgtcatcaacatcatggcaatgtggcgctcatgtctccacatgccgcatctcaattaccttcccaaaggaaggtaattgcctaagcatatagcatttgataaatatgagtatgcatgattctagaatagcatttctaagcaattgtcataattgactagggactcatacgtaaacatggttacgaaggcataaggggtaaacaataatcaaggcatggcataatcacaagtgggatgttcatcattgcatgcaatcttatttgtaaacaaaaattaatttcgcaattgggatcaacgtgatcaaggaatagtgatgacttgccttgctcgaggtcttgcgggtcttggccttcacccggatccgcggctccctcgggctctatagtttcgtgcgaaaattgatttgaattcggttagaattcaaataaaaatccaagtaaatccaaatggaagtcgaatgcgaaagtcgattcttttatattaactttactattcgcgaactagggcaaaccccatttcgatttaagctattttgcgggtataaatattttgttgtcataagtttttaatttaatctacccgatcaatataccaatataataggctagaaatttctatcgcgagctaaacatcggacgaaatcctagaaatattatacgacttaatttagtctatgattaaatgactaactataatacacggctaaaatccctagtaattaaatccgaattttctaccgttaatcgattacttatagagattacccaaaaataatctataataatttatgagaattcatatatttgtttagttattaatgacatctaaattactaccgtgaattgatttcttatagagattaccaagaataatctataattaaattttgcaattctacgactataactaatctataatcaaattctaattattttaaattttctaaacttccctaatctccctctaatttcctatttatttcctttttatttttcttttcttccctttcttttctttttgtttttctctcctccttctttttcttttttctttttctctcctccctcttttctttttctttttctctcctccctcccggcttctttctctcttcctctcttcttctctctctctcggcttcttcctccctcccggcagcgacggcggtggacgcaaggggaaaaagggcggcggcttaccgacagcgacggtcggcggcgacgacggtgacggcggcgcaaggcggcgacgcacggcgcggcggctccggggcgacggcgcggcggcttcgaaggcggcggcgcggcggcacgacgacggcggcgcagcggcacgacgacggcggcgcgtggagaaggggaagagggagaggaggagggaatggattggggtggagaagagggaatgggccggggtttttataggggagaggggaagaaagagaggggaaggaggggagagggtgaaacgacggcggcgcggcggcgcggggcgcgaggcggcgggcgcgcggcgcgaggcgacgagacggcgcgtggcgtggcagcggcgatgggacgcacgcggcgacgggacgcggcgatgggacgggcggcgcggcgcggtagcagcggcggcacggggcgcggagcaacgacggcgacggctcggcagcggcgatgcgacggcgcagcagcggcgatgggacggcgcgacgggaaggcggcgagcgacgcgcgacggcacgggcgcggggcgcgaggcggcagcacggggctcgggatgacgcgacgggcggcagcggcgatgcgacggcgggcagcactaggcgcgggacgacggcgacgcgcggcgatggcgacggcgcgcggcgtgacagcggcgacgcgatggacgggcggcagcggcggcgcgcggcgcgaggtgacgacgcgacggcgtgcggcgcgcggcaggcggcatcgatgatggcgacggcgcggcgcggggagggttaggctaggggacctcgtcgaacacgtggcggctgataaacagtgatttttttctattaaaccgattttagtgtatttcccatataaatttgattccacaattcctaatttttgcatatatgcattttactcaatatttgtgttatctcaactaatgaattcaccctagattaaaatttactcatatattatttttatataatttatttgaatttttaattagggttaattcttattccatcgtatttaaatttaattgatccaaatatggtcgcgataatattttatttacttctatccgcacctaatctttattttaatttatatttattttaccaatttatttttaaggtttattcctaattaactattctttactcacgattaataaacttcgagatcaaatccaaataaaataggcgaataagatcggcatgatgcaaataaatttaaaaagtttttgaaaatccgtatttttagagttttgattttgtcggtcgaattttcagggtgttacacaaaggattttactctctctgagtccatctgggaattttgaggactcaagagtgtagaatcctttgccacctgagtctctcttgatgccgaaccaccatcgcagcatcaaaattcaagctgccatgcgcccatgctgacgcttgctgctcattctcgtgctggcccaagcatcagagatgtacaatctgtcactctaatttatcgtatcatttcccctgtatggccaacgccggttatgacgatctatcatttctttggctctcgatctggcaacccctcgtcgtgtatagcattggtctctggtgaatggcctccatgaatgccgacaacggttggagcaggagccgtccccaaaaaacccatgagcagcgctgcgttgtccgtgttgccgtgcattctccctttcctagcacctcctggtcctacgggtacacaggcttactagctctctcttcttgagccactcgtcgttcatattttgttcacacttcagacaaatatttcattatatagtactctacattcatgatacttaatttacttttgtttttttgtttctatctatttattttatgcttctgctctgttggaagttgggactattgatgatagattttaagtgagttcaagtcgcacggtgtcaccattatatatgactgtactcttgaagtttgttcagttaatttaagaaacactacacggttcactggctatatatacatctatatataaattcgcttctctcttggctcagcaaatcaacctatcttcttgacccagaatcctctacacacaaatttagtagttatacacgggtttaacataaggaaatgatgaggcggtgagagtggaattgatacgtagattcatagatataagctcaaaactgagcaaataatgtgaagttttgagaatggagggcattggaaaaaaatgaatgattctatttcactagtggagaaaccatctttgatcggtcgaccagatttcacaatagtcccggttgtattaaaaaccgggaataaaaacatctttagtcccggtttgaaagcccatgctactttccaatctttagtctcggttggtgccaaccgggactaaagatccatttatagtcccggttggtgttaccaatcaggaaaaaagatcgccatacgctttactcccggttggtaacaccaaccggggactaaagatatctttagtccccggttggtgttaccaaccgggaaaaaagatcgacgcggagatcggagaggcatgcgcaaccgggaaaaaagatcgacgcagagatcggagaggcatgcgcgatcggatcgaggtatttccttctctcctttaactcctctcctcctctcctcaaccttatctcttcctctcctcaacctaatcttcctctccttctcctctccttctctctaacagaccaatggcaggtcgggcgcggaggcccggccggcgcggcgcgcggtgaggcggcggccggcgcgagggcggcgtgacgcggcgggcctgccggccggcgcgtcgcgcggtgaggcggcgggggtcggccgcgcaggcggcgggcgtgacgggccggccggccggcacggcggcggccggaggccgcgcggcggcggggcgcggcgggcgggtggccggcgcgtcgcgcggtgaggcggcggcctgcggcggcggccggcgaggcggcagatttttttttttttaagaatatgagattgttgtgtgatgtatttgattggatctgattgttgtgtgatgtatttgatttgtgtgtgatgtgaatatttgataattttgtagaagttgtgatgtaattttttttttgagattttgtgatgtatttgagtatttgagatgatcgattgtggatttggaagcaatttgaaatgattgatttgtgattttggggacaggattgatttgtgattttgattaaaaacaatgaagaaaagaaaataataaagagcaaccggatctagtctttttagtcccggttggtgtgggactaaaaattgatttttactcttggttttttcacccgggactaaagatagcgatctttagtcccggattcgtagtcccggttagaaaactgggactacaggggggttacgaaccgggagtaaaaaccctttctccaccagtgtttgtcgaatcgtaattttggcaataatatttatagagctaacttggagacctgaactgaacattgattatgacacagagacaatagtatatataggtttaggccttctagacatgtgttacagtttgtctatggtgaatctgcagagtcctcgaccatctcccgtaccaaatgtggcatttgctagatgagggagagataaagtccatgttttagaagcccatatagagtatatacataacaaaagctagtcctacataatacagagcaggttagcaaatgcatactatgatatcctcttgtagtagtactactggttctttgtatataaaatagctgtttgactagcatagtacatgtaaaaaataagaggaagagttccctatataggagtaaaaatgttccctgtttgtttttttggccgggtatgttattattggcttagcctcaactctgaaaagatcataacattttctttagggatgtaaggcatcagaagaatttatcgcacaaaggtaatttattcaactagtaattgtccaattatgtggatgcatatgtttatcatctaaagttacttttccctgcctcgcagaaatgcttatgcaacagttcctccaatgcatgacgcacactactgccacttcaatccgtggcacggtggcaacacttttctcatcacctagggtctttgtgagaaaagttggttattttctccatgtgatgagaatgtcttactttttgaatatggatttgccttttagatggtcactctgtcatccaggtgttggagtccagtggctgaaaaaaaaaactacttcagcacccaaagccactattttttgagaatataaacgaaatgtttttattttgtgctccataatatctttacgaaaactcctgatatttggaacctgtaactctgagagcattttcgcttattgtagatagtgaatacacatgttagatgtgctctatatgcaacctggtatttgggacaacataccgtcaaacagcaggacagcatacagtcaaactgcagaagccaagaaagtgggctggattgggcctgatatttgggccgtaaaccatgaaaattataagacattttggctattttatcctttgactagatttactaacgtccatatgaatttggatacatatatgaaacacatacttggatgaatgtatttaaaaccttaagcgtcttgtaaagtgagacagcaaaagtagtatatatagaccttctcttttctctagctcagaagtcgatacatgttcttgacccacagaatcctcagtgtgcattggttgaacacaacaatgggagtatttatgggatggcgagttggactattgtgcaagctgtcaaatgatggagaggcctattagaatggagggcattgggagaaatgtcagttcctattgatcgagcatcagggaaactattgctatgacacctagaacagaacaagagtatactatcagggagcaagggcacatggaaaccatgttgagtaacagaccagattacgcacgaggtgcagcttcttttttctctggactgaacaaggtgcagcatctgtgtttctcggctgaacaaggtgcagcatcttgttccaaactaactgcacatctgcatacaatgctcccttgttcgctccttctggcacgtaatacagctccaaccttcgattaccagcatgacgactgaattagcgggtctgcagccgccgccaaatctcccccgaaaacacttccaaattttttatctcctttgtttttggggtctttggaactaccgttatgatgttgtacatgttccgtgggatgcaacatgttcgctgaggagattagcgacgaaatgcttagaggacgccaccctctgagcggaacatcttaatgtcgatgatagagtggttgtttcctcttggaaggaagctttttcctcctctcgaatataatctgtaatttaatccaaaactatgtaatccacccttctaaactgttatatgaaattcaggtggggaatccccccacaccccccctttcttaaaaagaaagaacatcttgttccgggttttggaaatttaccacactatctattatttcctgtttagaatcagggcaaattaagttgtcgcacactatttaagattagttgatcacgcatatgtttatcatctgttgtgtgcatggatctcgtggttaagatttgcatttggattttggacccacgatccggcatacattaccattttgcaatctcatgtagttttttttaaagagacgggcaaaatacaaagatggttctggccgaactgacaatttgggtatacatttggttcaggtagtggttcaagctgcaaaacttaacagaattaggcttaaaatatggagggtttgcaaaaattttgtgcgttgtaaaaaaaaccaatcagaaatataatgtaacgtggctctgttcgaaagaacggtttggtttctttaacatgcgaaacgagaatgtcattcgtgattaattaattatttactgttacaaacttaaatttgaataacgaatttatttgattttttaagaaacttatttataaatttttttttaaatcacaccatttagtagttttgaaagcatgcttatagtaaccaagcgagttgcgaaagctaaacgagctttcaaactgagctgcacgcataacaggttgagttcgttagagctttttagcttagctaattaaccgcatgcaaaaacgggagtataattagcgcaagtattaattaagtactataatttgagaattagtgtttgatttttaaaaaagattatatatttttttattacgaaacacatcttaagttaaaaaaacaacgtgctaacagaaaatgaaattgcagcttagctttagggcatgcacaatcagggacactctatgggtgctctcactaaccgagggcactttataggaaactcccctcacaatggaggacaccctagatgttctagggctccccaaaatatgaggtaactggatgaagatactcaagcccacaatgggtgtcgcaaccaaaaagaccacggtggttattttcctatactaccccctctctctctcttctcttgtttctttcccccaaaaaagcgtcgtcaccatcccaccacgtgcttggtttctgccacgccctttgcctctctctcccaccgccgctcgcctctctcttgtctctctcgccgcagccaccgtccgttcgtcgcgaccgcctcgcgcctcgcgccggtgccgttggatctgcccccctcccctgccgtcagatcgggaaggagacgggggcggcactggcggttgcgggcgtggtgccggtggaggagcccaaggaggaggtcgcgacaaacgcccaacggcgagcacgggtgcctcaagcagtggtgatggtggcgccgccgcagcgcggttgctgctccgccggatccggtcatcgtcgccatcacctctctcttctctctctcgtctccacgccgctggtgtcgttgcggcggatccgtcgtcgccgtcgcctctctcttctctctctctcgttgtcacaccgctggtgaggggcaagaaggggaaacaaaggggaggagatgggggatggggcactgggtcgccacaacgcgtagccccgatcgagtggctcaggaaaagtgagctggggagcctgtcggtgatatggccccgggggtatgcgaagttaaggaaagtctccttcccatctagccacgcgaccatgcagcctcgccctccccccgcgcctcggacgacgctgaggcagctagggggcctcggggtgccacatcacacccctcgggccctcgaggtgcctcaccctgagaccctcgcccggccaccacgtggcggggggagtgagtggggcgaagggtgaggctgagcgccattaatgcgcgacgcctcaaccgtccctcgctgcgttcaatgcgatgagggcggacgcgcggcgccgcctgaatgacccgcgtcaatcgggcatgaccggattgtgaccggcctgtgaccggtcacttccgattggataggcaacggtgcccccacgtcccaccctatgctcgacggagtgggggcaggtatgctccgtcccatcgatgcatcgtcaggagctccctccacgtgaggtgaaccaccaaaagtccccattcatttaaagaggaatgacaggggtgtcccccgtgtcaggcgggggacggcgctgggccccactcaaggacggacggctgcttagcttccaggcgaaggcacgaatggcagtccgttccaggcggtgtgggtccccccttttgtgaaggagtaggtagaggcggtgcatgtggtatccccttgaactataaaaggaggaccttgcccaccgaaaaaaggggacgactctcgaccacttgagcctgaggaagaacagctaggttctccaaggagctcaagaaactctgtaaaggccaactataatcccaagcacaggagtagggtgttacgcttctaagcggctcgaacctgtataatccccagtctcacacgtagactctaagcactctaggcggatatacgctcttgatcagcactccttttcccccggctgaactcacaaaggggggtctcatgaccacccgctagagagggtcactcctcgacagctggcgcgccaggtaggcgtgattcacgcgtttgagaaagaagtcgcttccttctaccccaagtttccctccgtcctcaacgaccatggttgaggtcctggaggaagaggtggtgacgcacacccccactccctctgggagtgaggacgccagcgggagccacgatcccctccaccgccgccacaactctccgactcctccccgccgcagccctcgacggagggaggatcccacccggtccggtggctcggccctctcaccaccgccaggcggggggaagccacgccatgccggggcacgacgccgcctgacatacgatgacggcggctcgccccaaggcgctccaggtagcgggggcctttttacggcatcccccgtcaactcggagccggagactcctgtccagcgatggctggacgacgtggccaacctggtcaccaccacccagcagcagctggctgcgggtggccggcccgccactactggtacctcgcgtacccccaccgccctctccttgtcagcaaggaggagggcccgtcggtcggcactgacatcgaggcggtcgacagccccaacgtcgtcaagggcctcgggaagccggaggcgccacgacgacgtctacggggagcaggacgctcgaatcaacatcgagcgacgcaaggacgagcaccgtgctgcccgcatgggggagggcgcctccttatccggagtgctgcgctcctccacgtgaggcagcccgctccccgtgtccattcccggagggaccggctgcagggccttcgtggcgagtctccggaatgtccggtggcccccgaagttccgccctaacctcacggagaaatacgatggtagcgtcaacccctccgagttcctccagatctacagcacgatcatcgtggcagcggggggtgatgaccgggtcatggcgaattacttccccatggcccttaagggtcaggcgcgcggctggctcatgacttagccccccgacttcatccactcctgggaggacctgtgccaacagttcatcacgaacttccagggcacgtacccctggccaggagaggaggcggacctgcacgccgtgcagcggaaggatgacgagtccctccgctcgtacatatagcgtttctgccaggtccgcaacactattccctgcataccggcccacgcggtcgtttatgcgttccggaacggcgtgcggcataaccgcatgctggagaagatcgcctccaaggagcccaagaccaacgccgagctcttcgagctggcggacaaggtggctcggaaggaggaggcatgggcctggaactctcccggcactggcgcggcggctgcggctacccccaagcccacttcccgctccaagcggtgggataggagaaggaagaggaagccggcccactccgatgatgaggttcgacacgttcccaggcgcgacaatgtactcgccgatgagctgtcgcgcatcgcgttagcacgagccccactccctccaggggcctttgaagaaaggctcatgcagcagtcggcacggttggacccccgaggacgcccgacctcacggcctccaccccgacgcttggcgaaccgcaggcctcggggcccgagggggtcgaccccgacccccctcgtcaagttgcctggatggccggcatccgggtgtacctcgacaatcacacccttcctgaggatcacgcggaagcggaaaactcgcatgcgtttccaagcggtacgtgctagtagaagggaccctctaccggcccgctgccaatggaatcctcttgaagtgtatctctcgagagcaaggcgtcgagctcatcgccgacgcccaccagggagagtgcggggcccactcggcctcgcgcaccttggtcggtaaagcctttcgtcaaggtttttactggccgaccgcgttgcaggacgcccaggactgggtcaagcgttgcaaggcgtgccaatttcatgccaagcaaactcatcagtaggcccaggccctgcaagtcattcctttgcggtctggagtttggacatcctggggccctttaaagcggcccgcggcgggtaccagcatctctgcgtcgccatcgacaagttcaccaagtagcccgaagcttacccggtcattaagatcgacaagcattcagccctgaaattcatcaaaagaatcacatcccgattcggggtgccgaaccgtatcattacggacaacggcacctagtttaccagtgagcttttcggcgactactgcgacaacatgggcatcaagctttgctttgcctcacccgcccaccttaagagcaacggccaagtcgagtgtgccaacgctgaaatcctcaaaggcctgaaaaccaagacctacaacgtcctcaagaagcacggggactcttggcttgaggaactgcccgccgtgctgtgggccaatcggaccaccccgagctgcgcaacgggagaaacgcctttcttcctggtgtacggcgccaaggcggttctaccctctaagctctctttgggttcgccttgtgttgccctgtacaacgaggcgaaccaggatgagttccggcgggacgatctcgactacctagaagagtgaagaaggcgcgcggccctccgggcggcgcgctatcagcagagcctacggcgctaccatcagcgccatgcccaggcccgatcactacaagttggcgacctcgtcctacgtcgcgtacagtcacgcctggggttgagcaagctcttgccaatgtgggaagggccatacaaagtgatcggcgttccccggccgggctcagttcggttagccacggaggacggcacagagttgcctaacccctagtgaaggtgcacttaaactccctagtgggttttggtgattaatgacaaggtggttaaaggggactaacgtgtttatcaagtttattcacaggagtttagtcccaaagcaagttgtgatggctaagaatgcaaggagaccccccaatttgaatgttcctaagtgcgaaaaacaccgaaggtgattagactaggtttttcactttcgaaattgagtttaggaaaaaccgtactattaagaggggtttcaagtgtggttctggggtatacaaagtgctcttagtcatatccgtgagtcaaaatatttttggaatcatttttgaaaaatgattttctccccgggacagagagggctacccggaggttctggccggaacatccgggcgccatttcaaagcaaatttttcctaagtgctgcccggaagttcctagcacttttgcccggaacctcctggcaggtttccagttcaaacttgtgagtaacggctagatgacgtcacctagccgttatatatatggatttcgtccccaggtcaccctttggccattccacttaagttctttgatgttctagggttttctagccactcccaagattcctttgcttcctccactcaaatctagagcctatattgtgagattgagagattagatgagagtgaggagtgttttggagatggcttgaagattaggtttgattgagcactttggataccttgtgggctgtcacttgggcttattactcttggagatcttctcctagactgttaggtgtcacctgtgagcttccaaacatcttgtggatgtcccgggaaagtttgtgaaggttttcctcacctccgcaaggaaacgaggtaagtaagtaaagattcttgtgctgagttttcagaggttgtcctaggtagagcaacttgcacttgtggtcttttctagaaggaattgtgagttggatcttggtggtcactcaattctagaaaacgacctagaagtgttgagttgaaggctgtggacctcttctgggatctttgcataagtgaggcaaggggttaatcgagacccggctctttggagcacctcaacggagagtaggatccgtgtgatccgaacttcgggaaaaaatcgcctttgtctctcttgtgcatgatctgtgtttgaatctgctggtatattgtgattttcatcttgtgcaaccctgtgcctgatcttccctagctaggacctattttacttctcatattttgtatttctctattgcccggaagttcctggctcaagaactccggaagttccgggctgctgatcactgctaggaagttccagtgttcatcacaaggaggttccgggccgtgtcaatttaaccgctgcgtttgttgagaaaatttcaggaaagcctattcacctctcctctaggctacatctttgcacgttcaactggtatcagagcctggtgctcttgattcaagcttcactgctttgagtgatccacgatgtcggacttagggggaaaggacggggaaattggtaatgaagatggagcgagcagtaagggaactccatcacccaagggagctactataccttttgattacagcaaacttaccattccctctcacaacttcgtctccgtgccttccgaacgtgctcctcaatttgatgggacacattatgccgcttggaagcacaagatgaagttgcatctaatctctttgcatccaagtatttggaaagttgtttgtacaggtattgacgtacctcatgaagacatggagctcacttcggtgggagtgaggacatgacaaatcactttgttgtcaagagacttctccgtgcttttggtccaagaaatcccactcttgtatcaatgatacgggaaaggaaagacttcaagaggctcaccccaagtgacattcttggaagaattgtgtctcatgagatgtaagaagaggaagctcgtgaagtgaggcaaatggtgaagaatgccgccatgatcaaaaatcaagaagtagctttgaaggcaaaacaagaagaagagtcaagttgtgaagaaagtgaagatgaagagatggcttttattgtcaaaagattcaagcacttccttcgcaagagtggctatggcaaagggaggaaggatgatgacaagggaaagaggcaataaagagagcttgcttcaattgtggtgaatatggccacttcattgccgattgtcccaagtcaaatgaagccaaggctaagggtggcaagaagaatctggagcgtgctcatgtggcggaggcacacatggcggaagtgtggtactccgaagatgaagaagcctccgaagtcaaacccaagcccaaggcaaaagtgtcacgtcctgataaattcatcccgaaataaaaatcattttctaaaaggaataatagaattaattaaaattcgaaaagaaattggcaaacactaaaatacgtacaagaaaaattcaaatgtggcccggagaatttttgttaaattctccttggtctaaaaggagccctcaaattttagtggaattttcagagcacaaataataattgagaagaaataaacaaagttaaaaaggttttataaaaagaaaatccctaaaagtcttctttcccccctttccctcttgggccggctcggcccaactccctccctctctctcctctcccccgcggcccatcggcccctcccccgcgcgcgcgccgctgacaggcgggcccgcccgccaccctcgctgacgggtggggcccacctgtcatcgcctaccttccgccgctcccgccgcccgcccgtgccctagcgccgccgccgccgccgaatccgccgcatcccgccgtccccgcgcgcaataaagaggggggaattattccccgcgattccctctctcttttcccccgtttttccctctctctctccctcggattcgtccggattcaatcccgcaaacctcgccggcgcaatcaatggcggccggatcctccgcgccggtttccatctcctccggccgccttccctcactccaaccctatttaagccacccccgtgctctcctcctccgtttccgccactcgccgctcactctccccgtcggaatcgtgcccgcaccgtcgcaccttctctccgccgtcgccgccgagctccggttcgccaccgtcgtcgctccggacctcctcccgactcggcgtcacctccatcggcttcgccgcgtcgtcgtcgaccttgtccgcccctccgcttcgctcgccgaccgccggagcaccgtcgtcctcgccgtcccgagccgcgccgccgtcttcctccgctccggtcgtcatttccgccgccctcgtcgacccggggtgagccgtggaccgctccgttcgcttcccccttccctcctctctctcgggtgccgctccgccgcgccgttggtcgccggcggcgaccatcggggcgcgggtgcgccgcctcccgtcggccgtgccggcgaggccgccttcgggcgcgccccgcggctgccaagtggggcccggccgtcagccgcccgcgcccgcgggtgcgggctgacgcgtgggacccacggcgccggccgccgccagccgcgtgctcccggtccaccgtggaccgagaggctgacgcgtgggccccactcccgtggacccggtccgcgcgccctctctcccggctgacgcaataaatgagtttttaattaaaatttaaatgaagaaattcgcaaatatccatttaaagagtatataaacttcaaatggccataacttggccatttgaactcggaattggaccgttcaagtctctaatttttccttaagaagtcaagaacccatttttgtgctttgtttctgcttgttatatggagtttattagagtaaaggccttttcttttccgttggtcgtgtagacgctgcagcttcggaagatccgctcttcgtggaagttgaagccggcgtttggggaagtgagcaaggcaagtcacatcatccttgagcatattgaatcccagtttataaaattattttgatttaaattaatgcattatcgctttatttaaattcccgcgttatcactgttttatttagccatgcctatttacctttgttaagacattattattgctattgttattattaccttgttcaccctagaataaacaaaaccccaactagtggacactctattcatggttccactagtatgaatttaggtagatgcttcgctgattaattaggcaatattaggtggttttataactttagactttgggaattctcatatcttttggacaccatggaatggttggcttatggtggaattggacatacacctctcttcctctttcaaaacccctaaaacctgttttcggtggggtttgggtgcatgccagttgtgggaagtagcaccccggccactataaggattaagctcgggcctctgttgcaaagcactaccgtacttccacatgtctagtgggtaaggcttagtttgtggctcagtctggttataaacaaaagtacacggatggagatggacgaagtcgggggtcgatggacatctgtaggacaaatgaaggctacacgggctgcggcccggtagtcgagatgtcatggcacagggctggtgtcctgctgctaggggctcaattctgcctgcctgtccgggggttccggccgtaggtgggttgggtcggtactcttgtctatggctaggatgggttggaaactatgtcgcgtcttccgtccgtatgccgtggtggtatgtggcacgtggttacacgtgaggaagacgtgtcttgtgggtaaagatgtacacctctgatcagagtataatctattcgaatagccgcgccctcggttatgggcaagccgagcaatgtacccaagtcagtgttttaattcttaaaatttgcttaacaactaaaatgtggaatggttggcctgggttggcttgggacgagctgggacccagggtcgggttgccagttcggtctgaatcatcgtaggccttgggttaaggcaggttcgtgagggttcacggccttgattaataatactgtgtagctctaggatcgtctttataaaatggctttgggcaactaagtgacttttaaatgctgtttactgcaaaacttaacccctatattattatccccttgtactcccttgcattaattatgcatctccggtgtggcttgctgagtactgtggttgtactcattcttgctcaatcttttcccccttcagtaagagaagctttggagaagaagtcttaggtggagtcctggcttataccccagttgagcgcctgtgaaggtggagccgtaggcccgctagtccgctgctgtttatttttgtttgtcaggcctgaagtgcctttgtaataatgtaaatattatcgatataataaagatgtgccttttgtatcatgtttgtgtggtgtaccccggcttttcctgggacggggattaatacactagcgttcgggataaggcaattttcccggtcgcgacaaaaagacaaggttgaaggagagagtggtgttgctaccgtcgccttcaagtcatcttcttcaagcaaggagcgtctcttcaacaacttgagtgatgacaacgacgactcctaccactactcttgcttcatggcccaaggccgcaaggtgatgactcaaaagccctctcacgcttcttttgatagtgactctagtgatgaagaaaatgataatgaattagatgatgtgcttaagagctttagcaaacccactatgcaacacttggctaagttaatgagagctttggatagtaaagaacaatcactcgaaaggcaagaagaaatgcttattcttaataagaaaagaaaccttgccttagaggagagcttagctaaagaatgtgctaaaaatgaacaactagctaatgagcttaattgtcacgtcctgataaattcatcccaaaataaaaatcattttctaaaaggaataatagaattaattaaaattcgaaaagaaattggcaaacactaaaatacgtacaagaaaaattcgaatgtggcccggagaatttttgttaaattctccttggtctaaaaggagccctcaaattttacttgaattttcagagcaccggaaataattattaagcaacaaaaacaattatcaaagtttattaaaaagaaaaacctaaaaataaccctctccttccctttgggccaagtctggcccaaggtttctcccctctccctctcggcccgcggccgaagtccctctctcctccctctctttctctccctctccttctccccctcctccctttgggccccaaagcctccctcccttcctctcagcccggccgaaagtctgttttacctcccccgcgctacagtgctccttcttcctgctcaggcagagcccgagctctccagccgtaccatgcacagtgccaccgcctcctccttccaaatctcgcctccccggtgctcctttttccaaattagttgcgggaatggaatcctctcaatctcctcttcctttcccccaactttccccctttaatcccgcccccaatcaccgggatttaatccctcttctttgaccaccattgatgccgccggccacctcctccggcgccgttttcggcctctcccgtgaccggcacttcgtccttgccctataaaacgaagccctcctccttcctttggtccattttgctctctcccgagcccctagccacctccccatcaccttcccctctgtcctgtgccgacggccatctccggccgcccctgccgcagcgcctgtgtgccggccggccgtgccgtcgccatccgcgacgtcgcagctacttcctcttccccggcttcgcctccgtttcgcggggaaatcaccggagacgcgtcctcgccggcaaaacagtggtgttgccgccactgtaccgccttcagtcgccccggtcgccgcgctagagtgtcggccgacgtcgccgtctccatcgtcgacgtcgcggcgtcgccctccaccccggcctgccctcggtttcgccggaacaccgtcgcccgcgccgcctctccctcggtctcgtcggcacccactccggcagccccttccgccgtgccagtgcgccggccgacgtcgccatctccacctccggcatcgcagcggcaaggtcgtcctcggcatcgcttcccttccatccaaacccctccgcggtccatcgtcgttgcctccgttcgttctcgtcgtcgacgtcccgtcggtcgcccggctcgtcgtctcgcggcgccgcctccgtcatcgtcatcgctgcggcgtgttccacgccgtcctcgcatccgtgcagccgctgccggctgccctcgttgcctcctctccggccccggtcgtcgtcgtcgtcgtcctctcgtcgttcccggtcgtcgtggcgttcgtccctccgtcgagccgttctcgtccgtcgtccgcgtttgtcaagcgagccgctgcagccccgttgtcgtcttcgtcctcggctccgcatcgtcaagcgttgcgccggccgcgtctcgccttcgtccaaggatcgccgccgaagtcgtcccctcgccgttcgtctccgtcgttcccggccgcctccgccgcgcccgtttgtcgttgtcgttccctcacctcgtcgcgtggtggtaagggtccctcctctcgctgccccgtcctcgtcctttcggtgtcgcccgtgcccattgtgcggttgtcggccccggtacccgtgtaccggtgtcggtagtcattcgcttatgcgtgtggtgaccgtgttagtgtgtccgctcggtagccgcgtggtttccacgtgtgcagcccgtgtggtgtctagtggagtccgtttgtcggccactcgcctcggttgacacacgggatccgcttccgtcgacccgtggaccgcctctgtatacccggtctgccgtggtcccttaggttgacatgtgggatccgcatgtcaacagcgcagccttcctgtcttttccaggctagcgcttccacatgttttatagttgcaaagcctaattataataatccgtaaatctccatgtaacagcattaaagttcggatgatcatatcttggtcatacgaatcccgaatcgacccgttcaagtctcctaatgtttgttaaaacctaaagaaccgtgtgctttctttttatgtattgttattgcttctttataggcttgtagctttgcttgtgtgcttcgcgtagcttctgtcgttccggaggttctcgaagcgtggtttgcggtagtcgccgagggtttggaaggccgttctctctgagcaaggcaagtcacatcatccttgagcatattgaatcccagtttataaaattattttgatttaaattaatgcattatcgctttatttaaattcccgcgttatcactgttttatttagccatgcctatttacctttgttatgacattattattgctattgttattattaccttgttcaccctagaataaacaaaaccctaactagtgggcactctattcatggttccactagtatgaatttaggtagatgcttcgctgattaattaggcaacattaggtggttttataactctagactttaggaatattcatatcacttggacactatggaatggttggattattgtagaattggatgcacacctccccctctattcaaaaccctcaaaatggttttaggctgggctcggggtgcatggttttgatagtagcacctcggccacataaggaccggtcttcgggcctctgttgcaaagcactaccgtacttccacatgtctagtgggtaaggcttagtttgtggctcagtctggttataaacaaaagtacacggatggagatggacgaagtcgggggtcgatggacatctctaggacaaatgaaggctacacgggctgcggcccggtagtcgagatgtcatggcacagggctggtgtcctgctgctaggggctcaattctgcctgcctgtccgggggttccggccgtaggtgggttgggtcggtactcttgtctatggttaggatgggttggaaactatgtcatgtcttccgtccatatgccgtggtggtatgtggcacgtggttacacgtgaggaagacgtgtcttgtgggtaaagatgtacacctctgatcagagtaaaacctattcgaatagccgcgccctcggttatgggcaagcctagcaatgtacccaagttagtgttttaaattcttaaaacctgcttaataactaaaatgtggaatggttggcctgggttggcttgggacgagctgggacccagggtcgggttgccagttcggtctgaatcatcgtaggccttgggttaaggcaggttcgtgtgggttcacggccttgattaataatactgtgtagctctaggatcgtctttttaaaatagctttgagcaactaagtgacttttaaatgctgtttaccgcaaaacttaacccctattattatccccttgtacccccttgcattaatcatgcatctgccggtgtggcttgctgagtactgtggttgtactcattcttgctcaatcttttccccctttagtaagagaagctatggagaagaagtcttaggtggagtcctggcttataccccagttgagcgcctgtgaagatggagccgtaggcccgctagcccgctgctgtttatttttgattgtcaggcctgaagtgcctttgtaataatgtaaatattatcgttataataaagatgtgccttttgtatcatgtttgtgtggtgtaccccggcttttcctgggacggggattaatacactagtgttcgggaaaaggcaattttctcggttgcgacattaatttggctaatggttttttagctagccttagagatgtcaatgaaactcttcaagagaaatttgctagtttagacaaaagtcataaagatcttgaagttcaatttgatactctttggaatagcacctctcaaccaaatgtggtttctaattcttctaacccttctactagcaatggttgtgctaggtgttacaatattgatttgaactcttatgctactaatgttgatgctatgcaagctcttaagaaagagaatgaaaggttgggcactttgttgaaatatggatgcatgaagacattccatttaaaagatgccctttacaagaccatcaccgctcatcctaacaaggatggacacgggctcgggttttcgggtggaagtcctgtgtctaagagtgtgatggtaaatgggaaagaatgcttgatgtttgtgagagaaggtaaagctccacaagcaagtgaggtgactagtcttgtgagcagccagggacccggaacatccggacaaaccgggcgaaacctccgggtgggagtctctgtctcaaaaattcccaccaagaagttccggccggtttgccaggaagttccgggccaatggccgtgcacaagacatgaccggaagttccgggcataatgccaggaggttccggccagatggtctttactatgattcatatgtaatttccaaaaattcagagggcaaagtggttgcttattttaatgggaattacaatgatgagtaccgcacttgtgtgtgggtgccaaaggctttggtaactaacatcaagggacccaaacttagacaagtttgggttcctaaatcccaagcttgatttcttttgtaggcatactcctccggtggtttaagttgggttgtggacagtggttgcaccaatcatatgactggagagaggagtatgtttacaagtcttgatgaggagaacggaactcgtgagaatattgtgtttggagatgatggtaaaggaaaggtaattggtctatgtcgcgaccgggaaaattgccttttcccgaacgctagtgtattaatccccgtcccaggaaaagccggggtacaccacacaaacatgatataaaagacacatctttattatatcgataatatttacattattacaaaggcgcttcaggcctgacaatcaaaaataaacagcagcggactagcgggcctacggctccatcttcacaggcgctcaactggggtataagccaggactccacctaagacatcttctccaaggcttctcttactgaaggggggagaaaaatagagcaagaatgagtacaaccacagtactcagcaagccacaccggagatgtcacgtcctgataaattcatcccgaaataaaaatcattttctaaaaggaataatagaattaattaaaattcgaaaagaaattggcaaacactaaaatacgtacaagaaaaattcaaatgtggcccggagaatttttgttaaattctccttggtctaaaaggagccctcaaattttagtggaattttcagagcacaaataataattgagaagaaataaacaaagttaaaaaggttttataaaaagaaaaaccctaaaagtcttcttttcccccccttcccttcttgggccggctcggcccacttccctccctctctctctcctctcccccgcggcccatcggccccctccccgcgcgcgcgccgctgacgggcgggcccgcccgccaccctcgctgacgggtggggcccacctgtcatcgcctacctcgcgccgcgtccgccgcccgcccgtgccctagcgccgccgccgccgccgaatccgccgcatcccgccgtccccgcgcgcattaaagagggggaaatcactccccgcaattccctctcccgtttcccccgctttcccctctctctctccctcggattcgtccgattttactcccgcaatcctcgccggcgttattgatggagccgagatctccgcggccgattcctccctctccggccgccctctctccctcccgacgttatataatcgctcctcgtgcttcgctcctccgtttccgccgctcgccgctcgctctttccgtcggattcgtgctcgcgccgttgtacactctctccgccgtcgccgccgagctccggctcgccgccgtcgtcgctccggacctcctcccgtctcggcgtcacctccatcggcttcgccgcgtccttgtcgacctcgtccgcgcctccgtttcgtcccccgaccgtcggagcgccgtcgtcctcgtcgtcccgaaccgcgccgccgccttcctccgtttcggccgccgttcccgtcgtcgccgtcgacccggggtgagccgtggaccgcccctttcgcttccctctcctctccgctctctcgggcgccgctccgccgcgccgttggtcgccggtggcgaccatcggggcgtgggtgcgccgcctcccgtcggccgtgccggcgaggccgccttcgggcgcgccccgcggctgccaggtggggcccggccgtcagccgcccgcgcccgcgggtgcggctgacgcgtgggacccacggcgccggccgccgccagccgcgtgctcccggtccaccgtggaccgagaggctgacgcgtgggccccactcccgtggacctggtccgcgcgccctctctcccggctgacgcaataaatggatttttaattaaaatttaaatgaagaaattcgcaaatatccatttaaagaacatataaacttcaaatggccatatcttggccatttgaactcggaattggaccgttcaagtctctaatttttccttaagaagtcaagaacccatttttgtgctttgttcctgctgttatgtggagtttattagagtaaaagcccttttcttttccgtcggtcgtgtagacgctgcagcttcggaagatccgctcttcgtggaagttgaagccggtgtttgggaaagcgagcaaggcaagtcacatcatccttgagcatattgaatcccagtttacaaaattatttttaatttaaattaatgcattatcgctttatttaaattcccgcgttatcactgttttatttagccatgcctatttacctttgttatgaccttattattgttattgttattattattccttgttcaccctagattaaacaaaacctcaactagtggatactctactcatggcaccactagtttaattttaggtagatgcttcgcaatttaattaggtaacattaggtggttttacaactctagactttgggaatattcatatcatttggacactatggaatggttagcttatgttggaattggacacacacctccccctctattcaaaacccccaaaatggttttaggctgggctcgaggtgcgtggttgggttttgttagtcgtacctcgggtactataaggattaagctcgggcctctgttgcaaagcactaccgtacttccacatgtctagtgggtaaggcttagtttgtggctcagtctggttataaacaaaagtacacggattggagatggatgaagtcgggggtcgatggacattctccagggcaaatgaaggctacacgagctgcggcccggtagtcgagatgtcatggcagagggttggtgccctgctgctaggggctcagtcctgcctgcctgtcccggaggttccggccgtaggtgggattgggttggtactcttgtctatggctaggatgggttggaaactatgtcacgtcttccgtccgtataccgtggtggtatgtggcacgtggttacacgtgaggaagatgtgtcttgtgggtaaagatgtacacctctgatcagagtataatctattcgaatagccgcgccctcggttatgggcaagccgagcaatgtacccaagtcagtgttataattcttaaaatttgctcaacaactaaaatgtggaatggttggcctgggttggcttgggacgagctgggacccagggtcgggttgccagttcggtctgaatcatcgtaggccttgggttaaggcaggttcgtgagggttcacggccttgattaataattttgtgtagctctaggatcgtctttataaaatggctttgggcaactaagtggcttttaaatgctgtttactgcaaaacttaacccctatattattatccccttgtactcccttgcattaattatgcatctccggtgtggcttgctgagtactgtggttgtactcatttttgctctatttttctccccccttcagtaagagaagccttggagaagatgtcttaggtggagtcctggcttataccccagttgagcgcctgtgaagatggagccgtaggcccgctagtccgctgctgtttatttttgattgtcaggcctgaagcgcctttgtaataatgtaaatattatcgatataataaagatgtgccttttatatcatgtttgtgtggtgtaccccggcttttcctgggacggggattaatacactagcgttcgggaaaaggctattttctcggtcgcgacaggagatgcataattaatgcaagggggtacaaggggataataatataggggttaagttttgcagtaaacagcatttaaaagccacttagttgcccaaagccattttataaagacgatcctagagctacacaaaattattaatcaaggccgtgaaccctcacgaacctgccttaacccaaggcctacgatgattcagaccgaactggcaacccgaccctgggtcccagctcgtcccaagccaacccaggccaaccattccacattttatttgttaagcaaattttaagaattagaacactgacttgggtacattgctcggcttgcccataaccgagggcgcggctattcgaatagattatactctgatcagaggtgtacatctttacccacaagacacatcttcctcacgtgtaaccacgtgccacataccaccacggtatacggacggaagacgtgacatagtttccaacccatcctagccatagacaagagtaccgacccaatcccacctacggccggaacctccgggacaggcaggcaggactgagcccctagcagcagggcaccaaccctgtgccatgacatctcgactaccgggccgcagctcgtgtagccttcatttgccctggagaatgtccatcgacccccgacttcatccacctccatccgtgtacttttgtttataaccagactgagccacaaactaagccttacccactagacatgtggaagtacggtagtgctttgcaacagaggcccgagcttaatccttatagtggccggggtgctacttcccacaactggcatgcacccaaaccccaccgaaaacaggttttaggggttttgaaagaggaagagaggtgtatgtccaattccaccataaaccaacaattccatagtgtccgaatgatatgagactttccaaagtctaaagttataaaaccacctaatgttgcctaattaaccagcgaagcatctacctaagttcatactagtggaaccataaatagagtacccactagttggggttttgtttattctagggtgaacaaggaaataataacaacaacaataataaggtcataacaaaggtaaataggcatggctagataaaacagtaataacgcgggaatttaaataaagcgataatgcaataatttaaagcaacataattttataaactgggattcaatatgttcaaggatgacgtgacttgccttgctcagagagaacggccttccgaaccttcggcgacgaccgcgaaccacgcttcgggaacctccggaacgacagaagctacgcgaagcacacaagcaaagctacaagcctataaagaagcaataacaatacataaaaagaaagcacagggttctttaggttataacaaacattaggagacttgaacgggtcgattcagagttcgtatgaccaagatatgatcatccgaggtttaatgctgttatatggagatttgcggattattataattaagctttgcaattataaaacatgtgtaagcgctagcctggaagagacaggaaggctgcgctgttgacatgcggaccccacatgtcaacctaaaggaccacggtagaccgagtacacagagacggtccacgggtcgacggaggcggaccccgtgtgtcaaccgaggcgagtggccgacaaacggactccactagacaccacactggctgcacacgtgaaaccacgcggccaccgagcgggcacactaacacggacactacacggtcaccacccgcacgcgtgaacgactaccgacaccggtacacgggtaccggtgtcgacgaccgcacaacgggtacggggcgacaccgaaaggacgaggacgaggcagcgagaggaggaaaccttaccaccacgcgacgaggcgtgggaacgacaacgacgaacgggcgcggcggagacggacggcgagggaacgacttcggcggcgatccttgaacgaaggcgagacacggccggcacgaggcttgacgacgcggagccgaggacgaagacgaggacggggctgcagcggctcgcttgacgaacgcggacggcggacgagaacggctcgacggagggacgaacgccacgacgaccgggaatgacgagaggacgacgacgacgacgacgaccgggaccggcgaggaggcgatgaggacagccggcagcggctgcacggggacgtggacggcgtggaacacgccgcagcgatgacgatgacggaggcggcgccgcgagatgacgagccgggcgaccgacgggacgtcgacgacgagaacgatcggagacgacgatgatggaccgcggaggggtttggatggaggggaaacgatgctgaggacgaccttgccgctgcgatgccggaggtggtaatggtgcagcaagccgacgagccggggaggaggaaggggcggccgaaagatggaggccggcacgggcgacggcgttccggcgaaaccgaggagcagccggggtggagggcggcgtcgcggagccgagggaggtggtggcgacgtcggccggcgcacgggaaacgcgacagtggcggccggaggtggaacagtggcggcaacgccactgttttgccggcgaggacgcgtctccggtgctttccccgcaaaacggagggctgaccgagggagaggaggtggctgcgaggccgagggagaagacggcgcggccgggcggcgctcgggcgaggagggagaggcggctggaggcggctggcgcgaaggaaagagaagggcgacggcgggaacgtagctccgggggtcaccgcgcgaaacgaagggtaggccgtgggagaggaggcggctgcgatgctgtaggaggcgacggcgcgaccggacggcgctcgggcgaggcgggagaggcggctggaggcggccggcggcaagggagagagaggaggacggcggggagaggtgctgcggccgtgggggagctcgggaaggggctaaaatgagagaacgcacggagggggttgcattttataggatgggggagggagccggccacgggaggagcgggaacggcggcgggaaccacggccggcggcaatggaaggcggccgaggaagacgcgggcgttcccggcgattgaaggcacgaatcaagggggaaattggggggaattgaagaggattcaatggggtttaatttcccctatttaattttggaatcccatgagcgaatcacacggatttgagggaggaaaggagtagggttttcacgggagagagagagggccgggcggcggctggaggaagaaggcgacggcggcctggcgcgtgggccccaccgggcacgcgctcagcgcgcgtgcaacgcacgtgcgcgggagggaggggcggctcgggcagggggggctcggctgggccgggacacggcccaggaggagaggaggggggggaggcggcctgggccgggcaggccgggagggggggggaggagaggcagcccgggagagcgagggaggagggagctgggccgaggggaagggggcccaagaggagggagagaaggagagggagagaaagagagggaggagagggagactttgggctgggcttggcccaaaggaggaagaggatttatttttttaggttttcctttttagtaaactttgataattgtttttgttgcttaataattatttccggtgctctgaaaattcaagtaaaatttgagggctccttttagaccaaggagaatttaacaaaaaattctccgagccacatttgaatttttcttgtacgtatttttgtgtttgccaatttcttttcgaattttaattaattctattattccttttagaagatgaattttattttgggatgaatttatcaggacgtgacagtctaggtaaaattgccatctccaataatcaatttctctctaatgtccttcttgtcaattcattaagctacaatttattatccatttctcaattatgtaagttgggttacaattacttatttaccgatgaggatgtgaccgtctttagaagggatgactcctccgtagcattcaaaggcaagttaaagggtgatctctatcttgtcgatttcgatgtggatagagtgaatccggaagcttgtttgattgctaaatcctccatgggttggatatggcatcgtagactagaccatgttggaatgcggaatttggcaactcttctaaagggggaacacatcctcgggctcactaatgtcacatttgagaaagatcgtgtgtgtagtgcttgccaagccgggaaacaagttgggaatccacatcctatcaagaacatcatgactacaacacgccatcttgagcttctagatatggatttatttgggcccgtggcttacataagtattggagagtgaggctcaagatgtcttcaagcgcttcgcaaagcaagcccaaaacctctatgatctcaccatcaagagggtgcgaagtgacatggaggagaattcaagaacattcaagtggaggaattccttgatgaagagggaatcaagcatgagttctccgccccctatgatcctcctcaaaatggcatcgttgagaggaagaaccgaactcttattgaaaccgcaagagcaatgcttgatgagtacaagacttcggatatcttttgggcggaggccgtgagtaccgcatgtcatgccatcaaccgcttgtatctccacaagatcctaaagaaaacctcatatgagctcttgagtggtaagaaacctaatgtttcatattttcgtgtctttgggagcaaatgctttattttaagtaagaggcctcgctcatctaagttctcacctaaggtggttgagggattcttacttggctatgaatcaaatgcacatgcctatcgtgtcttcaataaaacctccggtattgttgaagtcactagggatgtgacatttgatgaatctaatggctcccaaggagagcaagttgttgtacatgttgtaggtgatgtggatccaagttaagctataggtactaaggctattggagacatacgaccagtcgagacgcaggatgaccaagaagatagggatcaaccttcatcatcgacatccaatagccctacatcgagtcgagatacagttgacccggaagtttcgggaccagatgatcgcaacctccggacctctctaggccaggaagttccgggcagaggacagtcaaggcgtgcctacggcactagtggatgggattgatgccgagggcactatagagcatcctgatcaggctcaggtccccccagtgcaccatccaagaatacatcacactgtccaaagagatcatcccgtcgacaacatacttggtgacataagaagggggtaactactcgttctcgtgtcgctagcttttgtcaacactattcgtttgtctcttctttggaaccaaccagggttgaagatgcacttggtgatccggattgggtgatagctatgcaagaggagttgaataacttcactcgcaaccaagtatggacgttggtggagagacccgaccaaaatgtcatcggcaccaagtggatcttccgcaacaatcaaaatgaacatggagtggttgtacggaacaaagcccggttagttgcgcaagggttcacccaagtcgagggtctcgattttggtgaaaccttcgcacccgttgctcgccttgagtcaatccgaatccttttagccttgccgctcaccatgattttaggttattccaaatggatgtcaagagtgcctttctcaataggcctatctcggagttggtctttgtggagcaaccaccggggttcgaggatccaaagttgccaaaccatgcgtacaagctccaaaaggcgctgtacgggctcaaacaagcccctagagcttggtttgaatgtctccgagattttcttttgaaaaatggttttgaaattggaaaggcggatactactctcttcactaaaaaatttaagagtgatttattcatatgccaaatttatgtcgatgacataatatttggttctactaatgcctctttttgtgaagaatttagtagtatcatgactaaaaggttcgagatgtctatgatgggcgagttgaccttcttcctcgggctacaagtgaagcaagcacaagagggcactttcatctctcaaaccaagtacgtgaaggacattctcaagaagtttgggatggaagatgccaaactcatcaagactcctatgcctactaatggccacctagacctcgacgacaatggtaaatgtgtggaccaaaaggtataccgctccatgataggatccttgctttacttatgtgcatctcgtcccgacatcatgcttagtgtttgcatgtgtgcccgtttttaagcggagcctaaagagtgccatttgattgccgtcaagagaattctaagatatctagttcatactcctaatcttggcttgtggtatcctaagggttgtgactttgagcttttgggctattctgattcggattatgtcgggtgtaaggttgatagaaaaagctcaaccgggacttcccaatttcttgggcggtcccttgtttcttggtcctccaagaagcaaaattccattgcataatccaccgccgaagccgaatatgtcgccgccggttcttgttgtgcccaactcctttggatgaaacaaactctaaaagactttggctacaacttcaccaagatcccactcctatgtgacaatgagagtgccatcaaaatagccaacaaccctgtccaacactcaagaacgaagcatatagacattcgccatcacttcttgagagattatgagactaaaggagacatgtgccttacccatgtgagaaccgagacccaattagccgacattttcaccaagcctttacatgagaaaagattttgcgagcttaggagtgagctcaatatcttagattctcgcaacattaggtgatgggtggttggctaatttatagccaaacatatgtcactaaaatgtaaattaaaaaaaaaattgagcttttgtgtcttgagatcacttcttgtgcagaagatggtcttgataccaggaataaagctcaaacattccctcttttattcaaaaaacctttttgaaaatctttgcgaaattcctttgtatgccttttattgctaaaatttggtttttatcttctctttgtgatgtatatcgaccatagttttgtattggttgcttgctggctggttatatacatcacaagtctctgcatgtccttagtcctctattcctccttttgattccttgtctctaccttgattttgggcctgactgccctttttttgttaggccggaagttccgggcctccctgtccggaacctccgggtgtcggggagtatatatatactcagggggagttagaaaccctagtctctctcctcatttcttctccctccccgacgccagccctagccgccgctacagtacccctagtggcatttttcacttccatccgtggaaatttgattcctctccgtggaatcaaccacattggtggctaggacgttcttcccgcgatcgatctgcgctttcctctctcaaggtagcacttttgatcttctcttttggttcatcatgttttgccccgatctctaaatctgtgaacctagggagaaaaccacttggatagtcttgtttctgctaccttgtagatcaccgatctataggatttgttcacgtgcactggctatttttgaaacccctgttcttctttttgccggctggaagttccggtgttgttgcacccggaacctccgagcgctgtccagccagcctgccattcttgcttctctctaattttgcctaactactgcactccaatttgttgattcctgttgcagtaagcactatgcctcgtgagaaaagacagaaagcctcccaggatgtgtccagtgatgagagtcctcctattcggtttccccgtggtcgtttgggtaaagagaaagtggttgagggcggcggtggcagtggcactcgtacttctcccaggtttacaaggcaatccagcaaccgtcctgttcagattagggatgttgacagtggtcaaggaagtgatgctcctagtacaagaggtcgtgggagaggtggtggtcgcagttctggggctggaagggcctctcatgatttccctgttagatctcgtgagaatcccattcggctctacaagtctcttggatttgacaccactcctatgcaccacattggaagacccaagtccaactaccttcatcagcttgccaagtgcagaagggaccgtttgattgacccatagacacagcctgaggagtcacaggatcctcgtttcaggactttcactcaattggattggtataactcagtgattatggctagagaaaatccagtggttgagatgaagtggattgattgggcttacatgaggaagaagaacgatgaagtgttcaatcaagcaatgcaagtgtgccacaacaagaatcttggagatattcttgccttggagtatgattggaatgaggaggtcattgcacagttctatgcgacagcattctttggtactactaggaagggaactccttatgtgaagtggttgactgatggtgtttggcacaagatttctatggcacagtttgctgagattttgggcttagaggatgaggatctcaataggcctaatattcatagtgaagcatccctccccatgatcaagaccaagttcatgtatgctaaggatgctcctaggacttgtatgggaactactcatggtttgcatccaaactacaaggtgttgtacttcatctttcgttggtctttgcttccaaaggttggagatgccactgctttgccttccaaacatacccatcttctcagtcgcatgcgctacaatcaccttcccttcagtgtgatgaagttgatttggtatgagatcgccaacaccattcttgagcctaagcggggttgcatctatgctcctttcattatgaagatgattgagacagtcaccggggtgttctacatcaaagatgggcgccacaatcctttttgtcctcgtgttccaccttcctcttctccaatggtacctagatccattccttctacctcagctggtccttcttctagtgccccaccgagatcctcgagttcttctcccatcaagaaggtacttcaggcaatcttttgtatgtgtgctaaaactgctaagaaagtgaagaagattgaaaggcgtcagaaggaagatagaagagaggctgggaaagaagtgtcagatgattctgaggatgaggtttatgttgatccatttgaggcttatgaggcagcccgcaacgttgccggtgaaggtccatccacctacttcaatgaagagtcttcccaatcagatgacgatgatgatgaggatgacatcgaggcagctgctgaggatgctcctactgatgttgatgagggcgacaccgctgcacagtccgatgagtctcatctctccggtgataccaagattgttccctccgatggagatggagatgagtgatcctcttcttctcttcatggtttcttgctttttggtgccttgatgccaaaggaggagaaattgtgaattgaagggggtcatttaaatctttttgctgccttgactgttgtctggtcatttggccggaaattccgggtcatgtgatccggaggttctggccaggcagatttcctctctattatctctctccatggacatgtaatcgtattctattatggttggatgtaatgactgttagatgctttattatcctttatgtcagtaagttagaccatatgaatgttacattttgatgtgatgtagtgttctttttatctttttgagtgattgccatgtcatctagtctttcttcttgcatatcactcatcattcaagcactcacatctgcatcttatttgattgagggtagtgtgaagtttcttttgagctttccttcgtttttatgcatattgtattcatctcattatatgcatatctttagggggagctttacacttctctcatcattccaaatttaaattctattatctttttgtgtgctttaaccatgttgtcatcaatcaccaaaaagggggagattgaaggtgcacttaaactccctagtgggttttggtgattaatgacaaggtggttaaaggggattaatgtgtttatcaagtttattcacaggagtttagtcccaaagcaagttgtgatggctaagaatgcaaggagaccccccaatttgaatgttcctaagtgcgaaaaacaccgaaggtgattagactaggtttttcactttcgaaattgagtttaggaaaaaccgtactattaagagatgtttcaagtgtggttctagggtatacaaagtgcttttagtcatatccgtgagtcaaaatatttttggaatcatttttgaaaaatgattttctccccgggacagagagggctacccggaggttctggccggaacatccgggcaccatttcaaagcaaatttttcctaagtgctgcccggaagttcctggcacttttgcctggaacctcctggcaggtttccagttcaaacttgtgagtaacggctagatgacgtcacctagccattatatatatggatttcgtccccaggtcaccctttggccattccacttcagttatttcatgttctagggctttctagccactcccaagcttcctttgcttcctccactcaaatctagagcctatattgtgagattgagagattagatgagagtgaggagtgctttggagatggcttgaagattaggtctgattgagcactttggataccttgtgggctgtcacttgggcttattactcttggagatcttctcctagatggttaggtgtcacccgtgagcttccaaacatcttgtggatgtctcgggaaagtttgtgaaggttttcctcacctccgcaaggaaatgaggtaagtgagtaaagattcttgtgctgagttttcagaggttgtcctaggtagagcaacttgcacgtgtggtcttttctagaaggaattgtgagttggatcttggtggtcactcaattctagaaaacgacctagaagtgttgagttgaaggctgtggacctcttctgggatctttgcataagtgaggcaaggggttaatcgagacccggctctttggagcacctcaacggagagtaggatccgtgtgatccgaacttcgggaaaaaatcttctttgtctctctcgtgcatgatctgtgtttgaatctgctggtatcttgtaattttcatcttgtgcaaccctgtgcctgatcatccctagctaggacctgttttacttctcatatttcgtttttctctgttgcccggaagttcctggctcaagaactccggaagttccgggctgctgatctctgccaggaagttccggtgttcatcaccaggaggttccgggtcctgtcaatttaaccgctgtgtttgttgagaaaatttcaggaaagcctattcacccccctctaggctacatctctgcacgttcacctagaacatcgaacatcttcgccgtttgtacccatgatgttgagtttgcttttcgctttttgtggcttgggccaacccccgcacacccctcgggctgtgcgggcttggccgggtgctaccactgtcaatatgattgtatctaccttttccactcggcaataaatccttctacttaatcaaagttgttgcgcacccctctttgttcccttcctttggctcgttctggctcaggaacgaacggcgctcgctccgagccctaggtggcgtcgggtagcctgaaaaccaccgaaggggagcccgaacgagggccatgccccaggctgcggcgaaccccgggggctcggaagggcctgcacacggtcatccccgactcctggtcgccgtagccctggcctggccagccccgctgggcggctcccccggcgtgacggccctgcccctcaccatctaggcgctaggagctagttgtcggctctcttccttacccgaacgagcccgaggggtggcaaggggggatagaaacggcaatctaatcgtaaaggagtcaactaaatgcgttcgccttcgtttttcccttgctgcaggcattcagaagagaaagcaagaatgtaaaagtgcaaggagaaagctttatttacaaccaacctgggtggcacaatggcctagagtttcaagcgttcgccacaatcacataacaaaataaaggagaaggggcgtgggccgtcccggagtgcccgggcctccaagtccggcgccgctgaccacctcgtccgaatcctcgtcgccgtcgtcgccaccgccgtcgtcgctctcgctctcctcatctgagggaagcgtgaggttgaaccgaggggccgtcccctcgaagcttgagacgatcgcgtgagccgcgtcccgaacctgctcccgagacctcgcctcagttcccgggaggaagtcctcgagcgcgcgccaaggaaggaagtcgagttcacgggcttggtgacttgcgaggacaagctccaccgcagcccgcgccaaggaagccgacgacgacttcacagcctcgccaacctcctcctcaagcgtctccaggtccgccgccatctcgtccagccgaagtgcgagcgccggccttgtggacgggagcttcttgtcccggcgcatggagatgcctacccggcgtcccgcgcgctccagcctttcgatggtgtcgtagtgttggcccggcccgatgtcgttggtaaggcggagggccgcgatctccctatcctagtcctgtaccaggcgccctagatcggcgagagtatcttggaccgtggtgagctggcagaccaactcggtgtgaagcaaaagaaaccttctcttgatctgtgcactgaagcaggtccaacttcttctctatagcgtgcagccaatcaccagcttcaacaggattggtggtgctagagaaagtaggcggcctcacgcgaagaaattctgctagcttattctggggaggtgcatagttgtttccctggttctgctggttctggagttgctgcatcatcagattcataagctgtgtctgttgagccaggacttgggcaagcatggggttctctccattgttgttgttgttattgggttggggccattcccattgcagcgagtaagcaccatctggcattagacaagagcacaagaagagaaacagaggaaaaactacttaggatagggaattaattttactgagtttcattattataaaactgaagactctcacaccacttaactcaccaactacctaacactcgaaagcaaacaaaggcatgcatttacatcccaccaacgatgtaaaccacatgcaagacccacacacacaaccaaacttaaacaggcaaactaacacaatgatctaaggcaacagcttgacaaggcgttctaggttttccgggcatctgagttgattgaaggctcgtttggctcgtccccatcatcttgagtagctccccactcgacctttgaatgggtgcgcttcgattcttcttcatcatcatcacttacgttgacgaccggagggtccgctggggctggggtagcttctttttccaccacacgaacctttggcgccaactggtagcgaggaacaaatagagctctcttccttgcggtaagacgaaccctggccttctgcggtggtgcttctcccttcaatgcggctaactccttctccaaacaatccaccttgtcctccagcttgcaaatcttttcgcgatttcggtcttcgcgatcttgagctgctgtcacaatctcagcgcgggtctcatccatggcccacagcatctcaaccaaatgcctcgtggaagcatcattctcaatccctgcaggtttaaggtagctgccacggtcacttccctggggttgacgaggatggtagcgatactcggtgtcggccaaccgatcattgtagctttcgcggagctcccctatggcgatccttgccacctcctgacaagcatgaatgtagcttccccctccagcctcgaacatcactgatgggatatcttcacaattactgttcaaggtgactttgacccggcacttctcttcatcacgatcatgaggaatctgggcatacaaaggggcagtcccaaatcctatgaggaaagacatcgtacgcaactcttggacaaatccttcagtaccaaacaagtactcaggcttgtagcacagcatctaaagacaagtgaaaggagggagttaagtcatttatccagttaatagcacaagttttggatcaatttgaataaagttagaaaatcaaagtaaaaggtaaataaataaagtaaaccaagcttgcaagataagttgaaacagttagaaacgggatcacaaattttgcacttttgaataacaggtttcaaaagaaataaaataaaagggaattataaaatcaacatgctaaacttatttcattgcagcaagattaaataaaacattgttataaaacttttactagtaaatgggccattagtacagtaatagatgtacagtactaacaacacaggaataataaataaattttgaatgagaacaattaaagagatcatgaactgcatgtgccattagtttggtgtaattaaaagagaaagggaggagaacagttctacttttccaatatttttagagggcttttataggtaaccatttggcataacctagggtcaaggaggctctgataccaacttgtcatgcccggaatttctatccaaaattccaaacgcttacatgtgtgtaaaccctcgtcctggaatcagccgaggcacacaataacaaattgataatagagtacaattattactctaattaataagcgaataaaatgtcattacagaggtagatagttcctctcaatcaataaagttctaagcagcggaaaataaaagaaacaacgcagacgactgctctccacaggcagcttgaccagggctaggcctaatcctccacaccatcagcatcactgtagaactcctcctctgatgaatgattgcaaggtgagtatatgacatactcagcaagccatgcagcaaatatgcaagtgcacaggataacaaaggatggcatagtatagtctcatttgcataaatagcatttaataaatatttcagaatttaataaaacagttaagtaataagtaaacaatattaatccaacgctatacaacataccctattgcataggcccaaccattctgaacaaccaatcccggctgcacagttctatctccaaaccaggaattaaccattccaaaccatgtgctaaacaagttattaccaattacagcatcatttattacagtgagaggtgtgaaattaatcacgaaagacattgttagacccgcccataaccgcgggcacggctatatgaatagtttaaactctggccagaggtgtaccactgtacccacaagacacaacctcaacatcatgtcaaccatgcgtcgcgatacttaacaagtacccgaatagagattgtgacaataccctctatataatacaattcaaagcagtgcaccgttcccggatcataatcacctccttataaacaaggtatggactccccagcgagccccgtgggcttatctccaccacttcacagtctggtgctctacaatgaaccatactatacagaaagtaaagtcgttgcccacgctggcttgtggttggcacggtaaatgtttcacaaccgaaaatcatgaaccggtccttaattgtcatgagtacaaccatcaaaaccatatgctcacaacccaccattatcaggttttagttggcaaattaattaattaaccaatcatgattaaccatcatgagctatcattaagccatcattaaataatagtgaagcctaagttatcccaacagtgtgctaatatttctaagcatggctaagcaattatatctaatatccagctgaacccatatataatgctcaactagtcaagttacaataacccaaggtatcaaggaataaagtaatcaagaacaaaaagggctataacaaaacaataggttaattccacccaatgacattcaaaaataaattcaaaaacaacagctttaaacgggatcaacatgctcaaagggttgtttgggatctgtgtgacttgccttgctggccttggaattcttcaaagtcttctcctgcaaattcggactctccgggaacgtcggaatctaaagagaaaagaacaaaatcaccaaaacagcacatcaacaagcatgaacagtacatgtggatatttttaacatgtagatctcaattttagaaaaatttagagacttgaaccaactaaatccgagctaagatgaattagttatgaattttcaaagattaaatcggattaaatcatttatatagattttaattgaattatgacgcaataatgaattatttttgaaaaggaaaaggggattattgcgtcagcggctagggttcacggtggaccgggtgcacggcggcggctcacggaaatgaacggccgggatcgatcctaaccaaaacgaacggccgagatcatcttgatctaccgcgggtctacggcggacgacatcgatgacgtcagcggtgacgtcatcatcggcggcggctcggcctcgcgtgctcgccagtgaacaacggcccggcggcgcgaacggagggcaccaacacgtagcggccggcacggcaaactcaccggtgacccaaacgacggcggatggtcaacggacggcgacggcgacgagttcgaaacggcggcgacggtcgggttgatgacgacaacggtactccggtgatctacggcgacgacggaggggtggacgaggtcggtgacgacttgacgatcacgacggcggccttcccgcgcgacgacgacgaccggagcggcaacggcgcacggctggacgaactgcggcgacggcggcgctaggctacacggcgctagagctctaccggcggcgagagacaaagacgagggtggcagcgggtagaggagacaccgggcgtccttttatagcggctagggggcgacggcgaaggcccatggcggccggcggcgcgaaggaaagtctagggttcggggagagagacgaatccgattcgagatcgaatccatggatttccaaacgattttagccgacgattccaaaagagaaaaggtagagtggatctcggggatcatttcccctctatcaatttcaccggatcggaaagggacgaacgaatttggaaggagacggcggcgcggctcggttagggttcggctgcggcggcggctggaggtagatgaagactgacaggcgggccccacctgtcagcgagcgggacgcgctcacgcgggcggcgctcagctgtgggctgacctgggccggggaggagagagagaggggtttgggccgactttcggcccaaagccaaaagaagactttttaaaacttttccaatttaaattattcatgaaatgcaattctatttattaaaaatacttccttgtctcaaataaatcccagaaaaatctaggaactatagaatcaagcaaagtatttaataaaattttatcttgcccaattttatattggaatttattatttaaaattagatcttctcttctaggcttttaaattcatttctaataattccaattaaacaacaatttatatatttaggatttttagggtgtgacaaggcggatgtcgcccaacgcctcatctaaggcgcttgaggcgatgagagccacctgccgttcctcctccgtctcccgcatgaccgagtccagcgtctcctcgtgcgcctggatctccgccagccgggcttggtgcattttgcgccccgtctccaccaagccctccacggcgcggcgcccctcatccactggcgcgcggtccgccgcgagctacgcccattctgcctccacggccgctcgctcgtccgccagggcttggacttgggcgttgagcccctcccggacggtggagtcggcggcggcgagcacctgcaagaacggctccatactcgccggactcggggaagaaaaggtcgtggtccgcccccgggacgacggagtgcggctggaccctccgcgagactgggggctgcgcttggtcccccttccgcgtggccggccccgagtgtgccccaggtgtagaggagaacggttgccgccgtcgccctacgcctcgggcccccgggccgattcagcctcggcctcgggctcgggcccgcaccctgcctcggtccctaggccgcactccacctcggcctccgggccacgttccgcctcggcctccgctcccgtgcggcgctccctgttagttgcgcccgcgggatcgcccctgaggggggcttcggtgccactatcgccgacggcgaattgcaccctctcctccctcgagggggcggtctcggctgtggtggactcagagccggacctggcgtgtggcccgcgggccccgctggggggtgtgaaggctccgcagccctggatcggccagctcctggccgtcccggtcgctcaggcttcgacccccgggggggttcggtcgctgaggccccttgggagggaatctcgctgcaggagaaccccatttgcgttaagaaagaaaagaagaggaggaagcaagaagccaaagggcatggaaagcaccggaccggacattgatgactgtacctgcgaagggggcgtctgaaggtccagttcgaaggctcgatgaagctccccctacatggctctgtctgccctatcttccggggccgcttcttcttccgccccaccttagacatggcggggcgtttatggcccactggtggtcggtcaactgtttgctcggcacctcacccgcgcgcgcggggggtggggggtttgagggcagccgagactcggacatcttccgcttccccttcgggtcgacgaccgagtctcccctaggcccacagcccggaccaggcatcctggagccgctgcccccgccggagccgccggtccggccgccgcccgcggtcgcactactgctacctgcgccgtcgccgccaccgccaccaacggcgccctggcggggccgacctcctccagcaccgacagccatcatcacagccaggatattctcccggtcgcggtcgctgcagagagggagaatcccatccggaattagcgtatgctcgatggtgtccaggcccagcacccgccgaacaaccgtcttcgcgtcctcctcgctccagtcccagcgctcgcccacatgggtgcgcatggggtcattgtacccggtgtactcccatgcgccgcgggaccgctcctggagaggcgcgatgtgacggcagaaataatctttgaacaccattgccgccattaggccccggcttcgtaggcccctgaggcggtcccgctccgcgtcgtactcctcccccagctccgagaccgccagccagcccgtagatcacttgggaggactggcggggtgccggaggcgctggtggtccggcagtgcggtgtagaaccagtccttcttccagtcctcccactttttgcggcggtggctctcgatgtagtgccccaccacacctggccggggttggaaatatcatcctcccaccaccgcgccttgcagcagctgtggaacgaagaagaactggaatagtcgcatcgtcggccgtaccccgacgaacatcttgcacaggtgtgcgaagatggccagggtcatcacggcattgggagcgagatgcaagacatggatctcgtagaaatccaagacgtcgaagaagaacatagagaagggcgggatcaaccccgcaatggcaaaggacagaaggtgcacggaccgctctgggtaccgcggccgtaccgcggccgcggccgcgtttcccctcccctcacaacggcgtcttccggcatgatcttgcggatgaggctaagatgcctctctgccgtaatgcgcgctgttgggagaacggcgttgccagcgtcttgagccatgatagccggcgggagtcggcgaggagcttggtgcgcggagcacggtggagggagagatgcgttgggggctgaggagcgagtatgcgagcgtgaaatcggcgaaaggaaggagacgaattctccatctcccctcctttttatcctcgcctcgcccgcgcccgcctccttgtttctcgccactgcagttgcctcgtcgattctcgcgcccactcgccccgttcgccccactaaacccgtgccccgtgcttaatgcgcctgtcagtcgcgcgctcggcgcggggcatgcgatgaccacggtcgtggctaggcgggcatgccgtcggtcccatcgcatgcctgacagcgggggagtcgaggtgatgttaggtgataattatgggagtgatctggcagacccctcgattttcccgaattaagcgcccccgtgagtggcgcagttaatagcggccaagccatcgtcatggctggcgctcgagccgggccagccgacggcggctgtttggaatcccagcgggacccaccatcacggcacgggaagtcatgaggcaccacgccagaccgccctgagaggaccgctgtctgacgcgatgccgggggctactgtcggtgatatgggcacgggggtatgcgaacataaggaaaatctccttcccgtctagccacgcgaccatgaagcctcgcccacccccccccccacgctccccggacgacgctgaggcaactagggggcctcggggtgccacatcacaccccttaggccctcggggtgcctcaccccgaggccctcgcccggccaccacgtggcggggaaagtgagtagggcgaagggtgaggctgagcgccattaatgcgcgacgtcccaaccgtccctcgctgcgtttaatgcgatgagggcggacgcgcggcaccgcctgaatgacccacgtcaatcgggcatgaccggattgtgactggcctgtgaccggtcacgtccgattggacgggcaacggtgcccccacgttccgccctgtgctcggtggagtaggggcaggtatgctccgtcccatcgatgcatcgtcaggagctccctccacgtgaggtgaaccaccaaaagtctccattcatttaaaggggaatgacaggggtgtcccccgtgtcaggcgggggatggcgctgggccccactcaaggacggacggctgcttagcttctaggcgaaggcacgaatggcagtccgttccaggcggtgtgggtcccccctttcatgaaggagtaggtagaggcggtgcatgtggtatccccttgaactataaaaagaggaccttgcccaccgaaaaaaggggacgactctcgaccacttgagcctgaggaagaacagctaggttctccaaggagctcaagaaactctgtaaaagccaactataatcccaagcacaggagtaggttgttacgcttctaagcggcccgaacctgtataatccccagtctcacacgtagactctgagcactctaggcgtatatacgctcttgatcagcgctccttttcccccggctgaacttacaaagaggggtctcacgaccacccgctagagagggtcacttctcgacagagccaaagccacccatctcccgcgtgggggttgtgcctctcgcctggggcacggcccggtgacggaaggagcacactgtttacgagggcacgggctagaaacacgcattgctgatggccttatgccctcccaaatgcaccctaaaagttgggaaaataggatgcataacttttaaaaaggccaaggagcatatgactaagtgtaaaagtacacacgagaaacaaaaagttcacattcaaacattttaaccaccctatagcaccgccaatacatatctcatcttcacccatcaaagaagccgtcatctgaaatctcttgggcctcgcctcatactatatcaccactccaaatcacattaaggttataaatgagtatcacaagataaagagagaaaataccaatctcaaagaatgaagtatggaacgattgatagaaaaacgactccacgagttaattcaaacacatggtgatgaatactgctgagaatggaaggcaccgggacacattctcatagtctgatacggaaggtatacgggcatgcacttcatatcaagttcctcgaaagtattattagttttaacatcacctatggaggtgcataattgatcaatatctcactgtctggacatttctcgcatgcagggatgtgggagctcactggccatcagctcagaatggttgtgtgatttacaaagcgcatttcgacaacacgaagagcacttcttccccgctaattaggtctgatgaaaggatgcggtgtcgctcgctgtagttcagcatcgcctttgctgcatcatttcgccaacgcacctaataagccacagtatttgcacacgctggactgctcagtgttgggaagttggaataacgctttgaccaccttgtttaaggtaattaataaataataaattaattagttcgctgaaaaagattaattagctcgattggataatgcctgggatcgggccatcggtggggggagcaaaaattggcccccccccccccccccccgccgccgcccccacgcgcgtgcatgctgcatgggccccaccatagtctctgtccctacctgccacttatctctaccacatactccattgcaacaaatcacttacatattttggaaacctgtattaagagaattcgtttttttttccacaaaaaatattttatctagtgcactcgcaatatttcactatatatatatctaatgttgcaacgaacagaaatagtccattgcaataaatcacccatatattatggaaaccctctattaaggaaattcgttttatttttgttccactaaaaatgtttcacctactatacccacaatgtttcactatgtatatatctaatgttgcagtgaactgaaatattatttcgctatttgctgaaacattgttttatacaaggtgaaacaacacccgatttaaacgattgaaacattttcgatctacttagtgaaacaattccgatatacttggtggaacatgtgcaacatttaaaaataattcaataataagctaaaaaaagttttcgtcagaatacatccatatgtggtcttgttttgtagatttaattgcaatgaatttaatggtgcaatcggatcatgatttggataaataatttaagagaaaaaatagtttagagtttggtttgcaggcatgtatggcgctgacatcatgctgacgtcagcgcctaatttttgcacaccttgatcgggcgcccgatcggtagtctcctccagctcgattcggtaaagaatgaagcaagccatgttttgtaagaggaagatcaatgcagtagcgcaaaataaacagcattatctctagtgtctagacaacaggtgcagtaaggtcaaaagttgaagtatatgtcagaaagaaaaacacttgttatggtttcctttttcagagtacgcccgtttcgtctaggtatatatatgtgcaaatatgcaatggagcaaataacgaacttttgcatcaactaaatttaaaacctcatactatttccaacaacaaaaacaagcacacactactacagaaagagattttgcagacgattggatccaattttcatatgcggttggccgggccgtctgcatgagaaggtcggcgaaattagcgattttcgtatgcgggtgcttatgtgggccacatgcaaaaataaaaaaatcgcaaaaaaaatccacgctgtccgctcccgccgccagcgccaggcagcattgtgccgtgcgctcccgccatcggggaaggaggatccgtccaccactgcccgatgccggtgctcccgagtctgccgtcttcgagtccgtgtggggccgggctcctatcgccaccgcagccagattcgtgcagggccgggcaagggacagccaccggatccaggcgggaggagccttgctgagccgtctgccaaagtcgtgccgtgcgctcccgccaacggggaaggaggatccgtccactaccgcccactaccggtgctcccaagtctgccgtctttgagtccgtgtggggccgggctcctcccgccaccgccgccagattcgtgcggggccgggcgatggacagccgccgctgccggatacgagcgggaagagccctgccgagccgctggccgctgaacccgggtgggaggggccccgccgagccgtccgctgctaccatcgactgaggttgagccaccagccgctagccactgccgcctgccgttgctgctgccgcctgccattgccactgccacccgctcccgtgctgccaacccgctggcttatgagttgaagaaaggagaggaggtgaagcggtgagagagatatagaagataaggatgaattaaaaatttttgaagtgttgccaaagaatatgcaagtcagacttctaaccagctcctcctcttaaggggccacatgtaaaaatgagcatttttgcatgcaaatatcgattttttgcatgggtctcttaagtagttgtatgcgaaaatggagatcgatttttgcagacgcagccagttatgatccatctacaacctatcgaatgtcttgtctagagaaaccattttttattagtgacattgccatggcattgggcttggactcctagcccaagcacaatgggaaggatagcatgtcgcggaaagttggtgcttacttggttggagaatctgttgtttggtaagatatggttgggtagtctctctaacggatccaggaaaaaatagtaggggatgtgaacaaactacactatgctacagccatcactttgcattatgtatggcaaaaatgtttagtggaagcttcatgggggctctcctatggtcctattgtcagtagtagaggttcgagccccatcgtccccatgttaaacttaggcattacatcaagaattatctagtgcccatgcgcctatctaccggtgcggagacgatctaaactctgtcaagccgtcgaggttcagggccatttttttccttcttctattataatactctattctattcttttccccctaaaatatcattgcatgtgacacatatggtgtgtgttagaaacaacggatgaattaaaaaggtgttcatgattgatgaggatgaacaactacttggatgtgcgaaggtcgacgaggagcacattttggggcctcattttagcccctcaatttaaggattctcgtgacctaattgggctaagaagctgaatacgggcatagtcttacggcctgttgggttgggccacatgaaaattgggcctccagtcggccacctcaaatttggtgttgacttcgatcactagcatttctagcgatctgtcaacagactccatctgatctatcacctgtgatcaatatcaaattaggcaaggtggtttgggattttcgtggcatctaaataatttaacttaacattaaactctgttaaacaatctaaaaacccttatattttttggatggaaggaatactaagggaggtagaaaaacatttcataatggtgtggtggagcatgcatatccaagaacaatttgatacatcctactatccagttttgctccttgaagcggccaggttgagcttaggcaaatattgtgatcctacttctctatttctacctttaatgtgtcgcagagctcctagctactttcctttcaataatatgttcaaacttcgatcagacagatatcacaatcctagtaataatgataatgtacttctttttttctttttatttactttttctgcttcatttttatggattcgactagttggaaccattgatgacaggcttttaatgacttacagtcgatgttaccattatccatatatgatgactccatgtaattgtgttcccaagctatatattcttttcttcgtttctctctcggctcatcaatcaacctatgttcttgagtactgtcggtcggtgaatatatattctgcaaggatgggatggtgtgaatttttagatagatatgagctcagaaacatgaggaaagaaggaaaagttttaagaatggagggcattgggagaaatatctgttttatagctgcaacggtcttgtcttggcaaccactactatgtataacgattctcgtcagtatcctatacatggaattaagttgtgtgctagtttatagcaagagtaatcgagagttaagctaagagaccagaaattcaagtttgacttctccagatttaggggttctagggtcctccgttttttttttcttttgtggtcacttaataactgacaagtttttaatagatatctataatgcctagttctgtgaacttttatccaaaccgcatggtaacaaaatggttgtgttggctgattttgtagatatgtagggggttcatattgagcatagttctgcatgtgttgctagagtttgggctcgtgataaccgtaattaaattctcgacatgattagctatacggttatatggtattcatgagatgcctattccattattaaaaaaaaaagttattgcttatttttttcaccggaacaaactgggaaattttgaagaagattgtaggaaggaaaaaaaatatcatcacccacacaccgataacatcaacacacagatccgtcgtgaagacatcttaggcactttgcatatgtgctgtcgagatagattggtacgtagttatgcccttcgtgtctgtgatcactttgaaaccacctgtataaaaccttttcattttatgaaaaaatgggactgatggtctttgacgatttgttctaaatgacaaaatataagggttaatatatatatcccgattcaaatattcaagtaccgcacagaggtgcatcccactgtacgaccaatcgatcttcttcggtctttctctctctaaatatacagtatatatacaacgacttagtgaatgcgcacagtcttgcctgggtctgatccatcaatatatggtgacaatggtatcgatgcactaaaagagcaatctgctgctcaagttcggttcgtagctaacgaaaaatgcttggtgtgattgagatcctagttgggaatggaaggaatcaagagaagttccgccacgagtgcatggatctggctcatggactagagaaattcttggtcaggagagttgtgacactgcctttcgcttgcagaaaaaaggacatcagccctgcgatcaactgaaatgagcttcgattaattgcatcggccggagagttgaagtcgaatgctagctaattgtgtgtatatttttgctccgtaacccacgaggagcggacccgattgaagctaaggcatatattaattgatataccaacttttgttaaacgtatttttctcaccatagaaattcctttgtataagctactaccttgagcgatctagaaagaattttaactattaccttcaagaacaattcatccattgtgatgtttttgaaccaattcactcgttatgatccattttgcgatatgatcgtcattttttttttaccaaaacacaaatatgatctcttcgctaaggcatattcgttgtaacgtatatctcattagctagctttccaggtagaattgggattgctactagtaccattttgctacagcagcgcgtagtgtgcgcacgagcatggctaagctgatcaagcaaacagattttggaaagaaaaaccctcctctgcttgtctctctctgagtgaattaaggaattaaggagatatcctttgcatctgaatgctctattttcttttcgaagaattcgggataatctgttaaggttattttttcttttgaagaatcgatggggacatggtattagatatgcaaaaaattagcatttgacttcagaaattgaagtatgaacacacggtacattctgaatattggatgatcattagttctcctacatatattattgatatgcatctcgattttaatcaaccttgttttgaaaaaaaaaaaatctgtccagagcacaaaatcaaccgcctcaagatcctgcatggcgattaaatttcctgagttgacccaagcacaatgccggaatggtcgcagttctacagccctactcgatcacatccacgatccatgttgccagatgctctgttgatgtagatccacaacaaactccccttcgatcttgcagtgtcgctcagagagcagagtgggtcgtctacatgccattgcggcatcgtctctttaattggttgtccaatcgggagcgagtcgtacctctacacacttgtgaacggagcaacataaattattattgtccattggactattgtatccttgttgtcagtgtgaaaaaaatctgcgtcccttaaatatagaagggttagattattttctactgccagtagggagtaacataaagaaacaagtttgttgttatgaaaaaagagagcattgtgattgaccatttgtcaaagagaaaaaagcaggttaatactactttgtcctacagtgaggatttcaggtactactcggatgtataccatgctaaatgataacatggtagtacacgaatttaaggtatgacaagaagacgaacaaactaggatgaattgctctgtaaaatatccactacaaaaaccagcattgatagttattagcaaaataactagttgtaacttggatgttaccatcaggcaaggcccagcactatatttatgcatttatacgcttgcaaccacactagtatagctcagaatcaaattggccactttacttaccttgcttcttgacgtagtctctgctactacttatatatatcttagcctaagtctgaatatgtatgccaagatcacaaagcataacatattattgcaataggcaagaatggaagaaaccgagttcaggttgtgcggtagaggatgcgacatctcctacttgacaacacgaaaatacttttgagaatggagggcattgggagttattcgcggagcttacatggaggtgtcactaacaagtctgatttcaattcatgatagttaaaaccaatctcaaagatgaatggattgagatggaggtattgagatacttatttacattcaggtttcgagatgataggctcgatactattcgtggagcttacatggaggtatattgagatgaagttcaactgatactttggccatgtttagttgtttaggtgtaaaaattttgaagtatatgaacacacatttgaagtattaaacgtagactaatattccgcctgtaaactgtgagacgaatcaattaagcctaattaatctatcattagcaaatgtttactatagcaccacattgtcaaattatggcataattaagcttaaaaaatttgtcttgcaatttacatgcaaactatgcaattagtttttttcgtccatatttaatgttacatggatttgtccaaacataagatgggacagaagttttagaagtttaaaggaaactctaaacacagcctctttttggattttttttttactgcagagatgtccaatcagtgcagcttttacatgctggcggtgatctgaccgttaagggggccgttgccatgcgtccggatcgcttttttctccagaccatctgggagttgacgttttttcgtgtccaacatatgatcacttaacgatttatggtgtaatcaataaagttgtaaaaaaccagctagcgatgtcaatttcaatattaattcactcttgcggaatcaaataactaatttacgacaatctaacctgcccaaataaattagctactagccaaattatgccacaaacactatgtgtccgtagcatggccataatcttagggtgagtgtgtgtgcgttgtgagtctatgtaattcaaaaaaaataatcttctcagcgaaaagatcctgatggcgagcagtgttaatgttcaagtcagcaagcagctcgaccacagtacaaacgctggcgagtgccccagagaaggagaggagagttcattgttacaatgcccatatttaggggagtgcataggatgaagacccacacaagccccaatttctttttcctgttcaattcaagccaatatgcatttcaatatttttaagaatattcttacactggtggagaaaccctttgtagtcccggttcgtaaccccctttagtcccggtttctaaaccgggagtaccaatccgggactaaagatcgctatctttagtcccgggtgaaataaccgggagtaaagatcgatctttagtcccggttggtgttaccaaccgggactaaagatcgagctgaccttttttttttgcatggccctgttgctgcatggtttatatatatatagtttatatatatatatatagtttatatatatatatatatatatatatatatatatatatatatatatatatatatatatatatatatatatatatatatatatatatatatatatatatatatatatatatatatatatatataaaccatgcatatatatgtttcaatacatatatatgcatacatatatatatatatgtatatatatatatatatattatattatattatatgtatatacatgcataatatatatgtatttatacacatatatatgttatgcaaattaatgcatatgtatatagatatatatatgaccaaaatatatttacattatagaaaatgtgtacacatgcatatagaaacatatgtagtcatgtattaattacaatccattatatgtcctagctagctagctatcatttcgatgtagtagtactcgctgctagctcagaagctaaggaccggtgaattgtgtttccgtcgtagtagaattcacccttgggattaaggatttcttcgatgatgaatcccatgagttgttcttgaaccgccgtgataaattccttgtgtgtggtcaggttatccctcatgcgaataaactatatgaatgtatgaaattgattagtaattaaacaagaaatcgctacgtaatgaaattttgaatttatttgtacgtacatcgagctctcttgtggtgatgatttggtttgcaaggcagtggcaatactcgcacacgtaatagccgcacaagttatttccctgcttttgctttgcgcactacaaataaatgacaaacaacgagagatctaattaatatacacttgtatgtatttgaatcggagaaatataaatgtagagcatgtgtactcacaagaaatttgaacttccgcctaagtctttctctccatttgccgcggaccaaatgacggaaccgataccaagccctacatggagtttaaagctatgattcgtagtagcaattaacataacaagattttcttaattaacaaaggaacttatgacggtacctgtctataagttcgaaaaccttgtcaaacgtagactcttttttatccattgagtcatatacgttgacggtgcaggcctccaggtcgaagagtaaaagcacccagtggaatctgcaatgtgcgtgggatgcattacatatgaaacacttagcaagttcgtacgggaatgaaatttggtatgtaggaagacagtaaaattaaactaactctgtgttgtatggcaacagtatgaacgtcttgtaatgctgcgccttcaggagatggacgagattgtcctctgtttcttgtggatattggtcgagcattgcgacgtttactctccgagggtcgatgaatccaatatcgaaaaccctccgccgtcgggccctttgaatctccattctacaacgataaaagggagtatattattttctatagtctacttatatacaaggacctaatttattaaaggagacgtatagtaagaaatctaaccgaacgatatacttacaaaatccagcaactcataatagagacgtcgagggcgtccagctggtatagttcgtagattcccttgaaattgatccagagaatgtcatctccttgcaagaagtccgtgtccctgatcctcgctccgatcatctctctaccggcggcgctcatctccatgtacagctgatggaacttgtacatttgtgtgggtagggactgcagcagctcaggcttgacaagcggtttaccgagttcgtacatgtatttcacttccgccttttcgattggtgcgactcctagcaattgatccgtagttagaccggtgtcagtaataaattgttctatcgtcatttctttaccggtaaccaacggctcgatctcctgttttggttgctctccaagctgagggactggtttggactttccagaagatgctttcttcagcgttcgctcatagtccgatagcttgatggcctccttgacagatgcagacatacccctgaagaagttcctgacactggggtctataggaatcttcttttctggacttcgaggcttgaattgtctcttgacttctgatgcaacgtaagcgtcaagctcctcttgcgtgcaatcgtaccccgggtccttgttcttggcggcgtcaactttcgccttcttcgttgcccttgtgtgggcaggcggtggagctgggggggcccttgactttgaaggtgccggaagaggagcttgcgggggagtaggtgtaggagcacgaggaggagtcggtgcaggatcctgaggaggagtcgatgctggagcctgaggtggagacggtgctggcggagcatgaggaggagacggtgcaggatcctgaggaggagatggcggagccggaggagatggtgcacgagacgccgcttgtcgcccagggaggatgatgtaccgcctgcgccatagaataatgccatggcttgtgtctcgtagatgcgtctcaccgtctcctccagggtaatccagctcgaggtcctcgtacgcgccttcgaccaactcaacttcgaccttcgagtatcctgctggaatcggcctgcagtggtaagtacctgaagggtccgttgggatggccatgcccgacgccaccttcatgttgtgagagattatttattagtaatcaacatatataagcagcaactagcggaatggctaaatcttacctttattgataagttcttgaaaggaatatgcagctcacatggtgtccgctgagtgatgtcatcaacgggacaggtcgattcgtcctgtgtttgcatggcgtccatgctctgtgatcctacctgccccgttgaggcgcagctgctacggtttcctgacgggctcaccattgcaggaggaatggtcggctggggatcatgggaccgatgtgcggccatgcgttcatcaaccttccttgccacctcctcttgcatgttgagttcgtagctcgatacccggaactctaggtctgcaatctccgactcctgtatgtgtggatgtcctccttgaaaccaatcttccaaggaatcacccctttccctcgagttcgtcctggatgctctggagtctgcagggcgagtgtcagctcgtccctatatctgtctggtcggaacgtgccctgagaggaggcttccactgcatctgttagtcgtcgcgcagcctcttgtatctgatagccgaagaccagtgagccatcagctgggttgagcgttccaccgtgagcatagtaccagaacttcgatcgttccggccaattggctgttgccggttcgatacccctctcaatcaagctagcctccatctgctcccacttcggcatcgcgacgctatagcctcctgaccccaagtggtgatggtacttcttcttggcggcattttctttgtttctttccatcatcgcctgcccttgttcacctgtcttatatgcaacgaactcgtcccagtgatcccttagctttgggaatgtgtcgaagttcggtgtctgccccttcagtatatacttctggtacagatctcccttgaagctctgaaactgttctgccattttcttcagagtccaccttttcactttgtcctctgtacccgcaggaagggtgaatgtctcgagcattgtggtccacagcatctctttctccgaatctgggacaaagctctcatgatctccgtgtgcccttgttcttcgccagtacaccgtactgacaggcacgttatcccgcacaacccaaccgctgtgacgtacatagttcttggcggcttcggccggggcactaggacgtccatcttcttccacttccgttatgatgtgccgaccctcaagcttcttcgctgcacctcgttgcccgcgtgccctcttctgtccaacggagggttgactaccactagcctcctcctcctggttcccctccacatccctttccacgtgcccctgctggttcccctccgcatccctctccacgtttccttcctcgttcaagtactggtttggatcctcgttcccctcttcttcattccagtactggctgcttccctccgcgattgtatcgtacaatatctgttcctcatcgcggttagccatctgttgatacaagaaacatctgctaagtcacgagacatttatgttttaacaatctaagtcatgtatgctaagtgtaaatgtcgtacattagaaccctacacaaccttacgtgctaagtctaattacaaatcgtgatataagctaagtctaggtgacgtatattgtacaaccctagctagtaaataattatatactaagtctaattacaaataaaataatcttatattaaaactcaaataatattacatgctaagactacaatagtcatgtatatgctaagtgtttcgtgcgtatatgctaagtctaattaagactacaatagtcaattgctacttgtcgcaccaattccgtagtcaataattacatactaagtctaattacaaataaagtaatcttatattaaaactcaaataatattacatgctaagactaaaatagtcatgtatatgctaagtgtttcgtgcgtatatgctaagtctaattaagactacaatagtcaatagctacttgtcgcaccaattccgtagtcaataattacatactaagtctaattacaaataaagtaatcttatattaaaactcaagtaatattacatgctaagactaaaatagtcatgtatatgctaagtataattaagactacaatagtcaattgctacttgtcgcaccaattccatagtcaataattacatactaagtctaattacaaataaagtaatcttatattaaaactccaataatattacatgctaagactaaaatagtcatctatgctaagtgtttcgtgcgtatatgctaagtctaattaagactacaatagtcaattgctacttgtcgccccaattccgtagtcaataattatacatactaagtctaattacaaataaagtaatcttatattaaaactcaaataatattagaacactacacaatcttatatgataagtccaattacaggtctaataatcttaattaattgcattacaaatataacaatcatttatattattacgtcacttgcctgctccaattccttctagggctagctcttccactcaggcttgacggacgactccgacaacacgtcttttctgcaagatacaaaaagatgtattaggattatagcgaagtaacatatatatatatatatatatatatatatatatatattgcatttcacgttaacgttcgtcctcgttcgttcgctcgttcatgttccctagctcgttcacgttcgttcgctcgttctcattcacgttcgttcacttgttctcattcacgttcgttccctcgttctcgcttgtcttcgatcgatcgttctcgttctcgttcacgttctcgcggcaacgtacgttgacgtgttcgttctcgctctcgttcgttcgatcgttctcgttctcgttcgttaacggtggtgtggcggcatcggggcggcggttggcgcggcggtgtggcggcggcggcgacggcggcggcggcgtggcgttgcggggccgtggcggcggcggcgtggcgtggcggcggcggcgtggcgtggcgtggcggcggcgcgcggcgtggcgtggcggcggcggcattgcgcgcgcggcggcgaaggcggcggcgtggcgtgccggcggcggcttggcgcggcgtcggcgtggcgcgtcgtcgtcgtggcgtggcgtctcgtggcgggcggcgcgacggagagagatcgagatcggagagatcgagatgaagggagatctggcggcggcggctctcaccccagagatgcggcggcagcggaggaggcggaggcggcggcgaggacgacgagctcgagacgacggcgagatacggcggcgtcggcgcggggatttgccctaggtagtggcggcgaaggagagaggccgagagagatcgatcggccgaaaacgtctaagtgttggtgaagaagacgagggcgcaccgggaatatatatacccccggatctttactcccggttgttgagaacaaccgggactaaagatatctttagtcccggttgttgagaacaaccgggagtaaagaaaagatatttactcccggttgttgagaacaaccgggactaaagatgatctttagtcccggttgttcttaccaaccgggagtaaatatcttttcccgctatttcgaaattctttttaaacccagttagggttaagaaccgggactaaagattatagcactgcatatgattttcgcttacatatgtgtttataaaatagaagttaatgcattaacattatttaaagtacaaagattaatgacaattacttcgaaaaattatttttgtctgtaataaattaagtggataaatcgtaataagcaaatatatgacttataattaataaaaattccaatatatatatatattttgcatatatatgaatgatattattatattggtaaaaactctaattaagatatgtatgtacatactgcatgatttaaaattaataaaaattgtaatcatcatatatacttagcgtaggaattatattaaattaaatgctaaaaactctaattaacatatgtaaatgccacatgcatgatttaaaccttttaaaaattcgaatagtcatatataagtagcatatgaaagatagtaaattaaattgtgaaaaactctaatatatgaatgatagttttaaaaatatattaaatttaatacttttaaaaattctccagtcaattataattagcatatgaatgatagtaaattaaatgttaaaaactctaattaacatatgaaattgccacttgcgtgatttaaaacttttaaaaatcctctagtcaattataattagcatataaatgctagtaaattaaatgttaaaaactctaattaacatacatatgaaattgccacctgtgtgatttaaaacttttaaaaattgtaagtatcacatataactagcatatacatgatttaaacttgttgaaacctctaataatcgtgcgtaattaacatatgccatacatcaattgatttatatggataatcaatacatccaaaatagtttacatcgtgtacacaataattacggcattacatcggcggtgacggttgaccgcacgtactttctcctcactattgttccctccttgtgatcgctgcgtgagtaaggggtgtcttcatttgataggaggatgctagggtcaatcgtcaccgtgaaagggggttgcccatccaactgatcgtaatcctcgtcagtcttttcctcaactccgacgatttttcttttgcctgggagaaccacttgacgcttaggctcatcaggccctctgcccttctttcctttgctagacatgtccttcacgaaaaagacttgtgttacatcattggcaaggacaaaaggttcgtccgagtatccaaccttgttaaggtcaacagttgtcatcccactgtcatcaatcattacgcctccaccagtcaacctaacccattggcaccggaacagaggaaccttgagaggaccatagtcaagttcccatatgtcctcgatggcaccgtaatacgtggcagttgttccatcgtgtcccatggcatcgacacgaacagcgctgttttggttcgtgctcttcatgtcttgggctctcgtgtagaatgtgtacccattgatctcatatccctggaatgtcgtgatcgacccagacggtcccctcgccaggaaggcaagttgttggttgattgactcgttacccatgagatgttgtcgtagccacgcggggaaagtatcaatgtgatgccgtgtaatccatgcatcggacttaccgatgttcctggcgcgaactagagccaagtgctcctcgatgtaaggagctaccaatgaagagtgttgcagaacagtgaaatgggctttacggaataaattgttgtctaccgtcgttattgctttccttccgagagttccctttccccgtagtctcccttcatggcgtgattcaggtaccccgattgggcgaaggtcttcgataaattctacgcaaaattcgatgacctcctctgttccataacccttggcgatgcttgcctctggacgagcacggttacgaacatacttcttcagaacgcccatgtacctctcgaaaggaaacatgttgtgtaggtacataggcccgagaatacggatctctttcacaaggtgacaaagcagatgcgtcattatattgaaaaatgaaggtggaaatatcaactcaaaactgacgagacattgcaccacttcattctgaagggcttctaatctatccggatcgatgaccttctgcgaaattgcgttcatgaatgcacatagctttgttattgttgcccggacattgtctggaaggataccccttattacaactggtagcagttgtgtcatcaacacgtgacagtcatgagactttaggtttgtgaacttcttctccttcgtgctttttattcgcttgatattcgtggagtatccagacggtacctttatgctccccaagcattcaaacatactttccttctctgccttgctaagagtgtagctggctgaactcaagtaatggcttcctttctcctttggttccgggtgaaggtcgccgcgttgttccatatgcttcagatcattacgtgcttccagtgtatctttcgactttccgtatacacctaggaagccaagaaggtttacgcaaaggttcttagtgaggtgcatcacgtcgattgcgtggcgtacgtccaagaattcccaatatggtaactcccaaaatatagagttctttttccacatcgccgcgtgaccatcttcgctctctatatgctggcttccaggcccctttccgaacactactttaagatctttaaccatagcaaacactgttttcccgctgcgatgtttaggcttcgtacggtggtcggccttatgttcgaagtgcttgcctttcttccgtaccgggtggtttgctgcaaggaatcgacgatgacccatgtatacaaccttcctacagtgcttaagatacgtactttctgtttcatccatacagtgagtgcaagccttgtaccccttgttggactgtccggataggttgctaagtgcaggccaatcgttgatggttacgaacagcagcgctcgtaggttaaactcctcctgtttgtcctcgtcccacacggggacaccttccttcttccacaactgtttaagatcttctaccagtggtcttaggtacacgtcgatgtcgttaccaggttgcttggggccttgaataataatcggcatcattatgtacttcctcttcatgcatagccaggggggaggttgtagatacacatcgtaacgggccaagtgctatggccgctgctcatctctccaaaaggattcatgccatccgtactcaaaccaaaccgtatgtttcgtgcgtcctttccaaattctttaaattttctgtcgatgtttcgccactgcgaaccatcggcggggtgtctcagcatcccgtcctgttgacgctcttcagcgtgccatcgcaacattctagcattccccttgttcctgaacaaacgccttagccgtggtattatagggaaataccacatcaccttagcaggaattctcttctttgttagctgcccgtcaacttctcctggatcgtcccgtctaatcttgtatcgtagtgctttgcaaacagggcatgcttctaggttctcatactcctcaccgcgatataggatacaatcgttcggacatgcgtgaatcttatgaacttccagtcctaacgggcagactatcttcttagcctcgtacgttgtctcgggcaatttgtttccccccggaagaatgttcttgacgagtttcaataaatcgccaaatgccttgtcactaaccccattttttgccttccattgcagcaactccagagtggtatccaactttttgtgcccctgctcgcaacctgggtacaacgaagttctgtggtcctccaacatcttgtccaatttatgggcctccttttcactttcgcagtcctccctggcgtcctgcaacatctgaccaagatcatccgcaacgtcgttaccatcagcagctatttcctcctcccccgtttgatttccttcaaatccaacatactgagcaaagtccggaatattgtcgtcttccacttcatcttcttccatttcaacaccttgctctccgtgggatgtccaacaattatagcttggcatgaaccccgactcaaacaagtggaaatgaatagtcctggatgcagaatactccttctgattcttacacttattgcatggacaacaaataaaacccctttgcctgttagcttcggccactctcaaaaaatagtgcacgccgtcaataaactctttggaccgccggtcagcgtacatccattgccgatccatctacatgagtcaaaaaaaccgtacacaaataattattcttacaataatgacagtcatacaataattataagatatctttattcatacaaaaatcataaaatattacaccaaataattcttaaaaactatttgtaaagttttaaactaattttaatgtgttttacttcttttaattttcattttagtttgttttctattatttaagattaactttcactagagttttccttctcaactattttataaaaccttgtttagcaaatgaactaaatttctatatattctttcttccccacacacattttctctctcatcaacttacaactaaattttggagacaaaaaaagtgtgcaaaacataggtgcaaatgtagtatgacaaacaaaaacattggaggatgaagttgcaaaccttttaggcacctccgatttgtatgtaatcaccaaaataaattcaatagaaattttggcatgacctcccctcttttttgaagaaattttgaagcttgctcgggcagctggaggaggaagaagacatatatataggggtgggactttagtcccggttggtagcaccaaccggggctaaagatcaccgggatctttagtcccggttggtattaccaaccgggactaaagttacgatctttagtcccggtttgtgttaccaaccgggactaaagatcccgggggggcctgacaggccctgacagcattcgaaccgggactaaagatgatctttagtcccggttggtaacacaaaccgggactaaagatcaaatatgcccgttacccttttgaaccgggactaaagatcatctttagccccggtttttattgcatccgggactattgtggaaatcggccgaccgacgaaagatggtttctccaccagtgttactttatttctttcaaatcaactatttttctttccactggtatggttgcagcacacttgttttccatagctttgataagtattcaataatattcatgccatataaaagaattgtttacccataactaggaaggaagccatcaataaaaagaaaagacgactcactaattaattcaaaacatgacgaagaataatactgctgagaatggaaggcaccgggacacattctcaagtctgatacagaaggtataagggcatgcacttcatatttatcaagttcctcccaaatattattagttttaggaaaaagtacaccgaacgtcccgcaacttgtcatcgggataaaaaaacattctcgaaccgcaaaactagatatgcgaggtcccttaactatacaaaaccggtcacaatagttccctcagcggttgtgatcccggttttgtcctacatggctgctgagtcagcgtgggatccacgtggaccccacgtgtcagcctcctctttctttcccctcttctctttcactcgccctcctcgtcgtgcatgctcagctcctaccgccgacgctccggccactcggtgctccgcctcttcatgtgggcggcctccacgctcttcctcccgctcgtctcctacaccgtctccgtcgccgccaagtgggacgccgcgcgccgaacaccacggcgtcgacgagcgtcccgctcctcctcgccgaggaggccgtcgagcacgaacggcaccgcacggcgagagcccgttcgcgtacgcagatgacccctgcagcgccagctacccgctgatgcagaagatgcgcgccgtcctcatcgagcacgcgctggccaacggcgaggcggagcgcaacgtcgactcctcggtgttcgccaaggtcacgacgttcgaggaggagcggcagtttcagtagctgcctgcctctatccaaattgctaaatttggctatggcatcgcaacttccaaagaacgacgttgcaaacaagaacttaaaaaaaaaaaaaaggcatacttattacagcatcagctaagaacatctgtgaactgaatttctgaaacacgctaatatgttcctatcttctcgtcggtcctctgttcagcaatcagcagatgggcagaggctcgccgttccactccttgaggcactcgagcagtgcgtcgatgtgcttgcccaggttcatggcgacggacaccttgttcacctcctcgccgggcgaccgcgtcttctccccggtcaagtactctgtcccgagctccttgcggacggaccggtagagcgggtacgacctgcactcggtgatcctgttcgcctttgcggcggtgccgttctccacggccgcacggggcagcctcctctcctccctgggcagcgccacgcggagctcctcctcgaacgtcgcgaccttggcgaacaccgaggtgtcgacgttgcgctccgcctcgccgttggccagcccgtgctcgatgaggatggagcgcatcttctgcatcagcgggtagttggcgctgcaggggttgtccggccgcgtacgcgaacgggctctcgccgtgcggtggcgttcgtgctcgacggcctcctcggcgaggaggagcggaacactcgtcgacgccgtgcggtggcgttcggcgcgcggcgtcccacttggcagcgacgtagacggcgtaggagacgagcgggaggaagagcgtggaggccgcccaaacgaagaggcggagcgccgagtggccggagcggcggcagtaggagctgagcacgaggaggagggcgagtgagagagagaagaggggaaagagagaggaggctgacatgtggggcccacgtgggttccacgctgactcagcacccatgtaggacaaaaccgggatcaaaaccgccgagggatctattatgaccggtttgtatagttaagggacctcgcatatctggttttgcggtttgaggacgtttttatattccgatgacaagttgagggatcttcggtgttctttctccttagttttaacatcacctatagaggccggtgtaattgatcaatatctcactgtctgatgatttttctcatgcagagctgtgggagctcattggccatcagctcatggctgaagtttaatttctcagtaacaagatggacatgtacattgcgatcgctctaagaatgcgtgatttacaaagcgcatttccacaacatgaagtgcccttcttccccgctaattaattaggtgtgctacaaatgggtaggctgacgatgcaaggatgcggtgccgctcgctgtagttcagttcagcatcgccttactgcatcatttctggctaaagatgcggatgcagaataagaaaaaagctggggttgatttcgccaaacgcacctaagctacagtatttgcacacgctggacagctcaagagtgttgaaaccttggaataacactttgaccaccttgtttaaggtaactaattaattagttcgctgaaaaagattaattacactactggagaaccccacatctctccttgttcgcaaccccctttactcccgggtagcgaaccgggagaagaaatccgggactaaagatcgcaatctttagtcccggttcagatacccgggagaaaagattcatctttaatcccggttggtgttactaaccgggactaaagatggctgagccacgtcccggttgatctttttttttcattgttaatttactattgacaattaatccctgtattttctcgcaaatcaggtgagatgcatatccccaaattaaaccccaaatcaagtagcatccaaatcattcacctcacaaatcatcccaaatcattcacctcacaaatctaagttacacacaaatcaaatacatcacaaatccttaaataaattacacacaaaataaaaacatcacagatccatgaatcacaaattctagaaattatacatccactgaatcacaaatcacaaatcacaaaaaaaaaaacggaggacgccagccgctgcctgcgtgcgcggcctcgccggatgcccgccgacgctggccgcctgcccgcgctcgcccgcgccggccgccgcctggcccgccgcgcacccgccaccgccggccatgggccgcctacgcgccgtcgccgccgccgaccgcctgcccgcgctcacccgcgccggccgccgcccggcccgccgctcgccgcttgcccacgccggccaccgcctggcccggcgctcgcccgcgccggccgcggctcagcccgccactcgccgctcgctcgcgccggccgccgccggccccggcgctcgcccgcgctggtcgcggctcggcccgccgctcagccgtgcagagggaggagggggagtagaggagagaaggaggaagggaagaaggggaggaggagaggggaggggaggaggaagagatcagatctgaggggaggagagatcgaggggacttaactgattttatctaggacttaaccgatcagagatgggagagaaatattcactctcggttggtaactccaaccgggactaaagataaatctttactcccggttggtagtatcaaccggactaaagatctaaatgatctttactctcggttagtactgccaaccggaactaaagtggtaatctttagtcccggttggtcgtatcaaccgggactaaagttccttggccccctggtaggtttctgacaggggatgaaccaggactaaagatgatctttagtcccggactgaagatcaatttttaaccgggactaaaaacaatctttagtcccgggttttattagaaccgggactattgtggaaatcgctcgaccctccaaatacgtgttatggttaaaaggtatatacgcttgcaaccatactagtagttcagcatcgaattcaccactttgctcatcttgtttcttgacgtagtctctgctactaccctatatatatatatatatatatatatatatatatatatatatatatatatatataaataaacacacacaaaggcatactgtatccgtatattccataagtcataggataagagatatgtcttaccggtaaccatgacaaacacttagtgattttaggacttagtacataggttctcaaatcatcacagaatacaaggtgctttggttggcaagttggtttgatcgggttagtgcacggactaaaccgacaaagacaccttggcaaccggagcacttcttattctttcaactttgataattaaggaactttaataggaaatatgtatgtagttatgtcgatatgtattttgataggaaatttgtggcgtcacttagtaaattaattaattttgtaattttgtaagttatttaggcgatgtctcagtaaggtgaaccaatatcgatgacactagtgggtccacaagggcacggactcctaggacagggaacaaaatccctaagaaacggtaaaccataatagaggtgaaccactattaacaacggaatttggcatcagattcagagaagaaggacgaagatcaaagcggatttggtgttgaatctaaatgaacttggagtcagactgcgcatcggttggatactgtgccggctgaaaatagagtatgaagttgatcgaggttgatgaagccaatggccgatacagcatgacttggtctcggcataggcctagagtgggaaaatcgtcattgccaataagagatagagctcgattaaagcaattatatctattaattaggaattgagtcggtttgttagagatttggtaaggggccatcgtatatgtctgtatcttaattatagaaaggtttgagccatgtccataatggactgagtttgtacttggggatataaatatgaaccccatagcattgaaataagggatccaatctaacacaacttcggcgcatcgccacccttttacttttctcattttccggcgagttcttcgcaagaggtaacccatctcaacggcccgcgctatcggggctaacatgtcgctttagacgtgttaggctcgatatcgcgagtcattcctatcgtatgtcttagttaatctatccttagcttcccaatttagctctatctgctgctgctcgctttagggtttatgttggtttcggctaaattgtcttgttatattagattagctaaggcatctaccatcccgaaaagtgtctaattgcttgattatctagactgcatgtttcttttcaaactttgagatgcatcatccctagtcgtgcttagaaccatgcaaactagcctgcaattaggcataataaggatagtatcggggttttagccaatcttacctaatatacatgtttcactccatgtttcatgtatattcgccacttatatagatagatcattttatataagcatatcaagctttagtcaatatcagctagactcttgtaccttcatgcctgatttctatttgatatgtttatatggatcaatgtctatataggtttgtactagagtattagctagtacgtcatctttcttgctcgtctcatcggctactttcataatatcgtcttaaaccaatctattaaacaccatagacagtattacaaccgattgggcgtgtttagggtttattattccttgatatatccagcacatagcatatttggtctaactccatcggctgagactatcaactatacactatcggctaatcaactatcgaacgactaattctgcttatattctttcttgctgattgtaggatcaaatcagttgggacgcccttgacacactcgtggctagcagtggacctgcattgaagttaagcagatctcccaggccatcgtgttttcacatcaacaaccacctaggagtgcttactcatgcccccaaggtttggagaggtacaggttgatctgcagagtcatagggtgcgagaacttctcaattcttgtggatgacatcaaactagtgctggaagccgagaagaacactacttggctaaagttcaaggagagcttcggctatcctgcagccgacgagggcaggctcaagcgggcggctttcaagaatataggcaattattggaaaatcattaagtccaggctggtcgccgagtacgtcctcaacccggctactccgaagccatatgggctcttcccattcatcacgccaagagtgtgggagcagttctacgagaagaagtcgacacctaaatcccgggccaaaagcgaggcttatcaggaactctaggctaggaacttgcactcccaccggcttggcactgcaggatacgccaggaaggaacaacaatggtaggaggaggatgaaacggtaggggaatcaaacacgccgccggtgtttggcgatatcccacacccatgagcaaggaactgggcaagggcaaagggtcacaagaacgacgatgggacaatttcgtcgccaaatccccaagatcaacaagtgtacgaaaatatagtaagtgtctcatctcaatatgttggcatagtttccatcgtacttttgatttaacacaaactcaattgtactgcagaaggagttggttgcctcgcaagaagcctcgtaagaggcttgctcttaaagacacgaggacgtatatttaggcatatacgtgcttgcaaccacactactagctcagaatcaaatcctccactttactcaccttgcttcttgacgtagtctctgctactaccttatatatatcttagcctaagtctgaatatgtatgcgaaggtcacagagcataacatattattgcaatatgcatgaatatggaagaaattgggtccaagttgtgcggtagaggatgcgacctcctactttacgacatgaaaatacttttgagaatggaaggcattgggagttattaacggagattacatgttcatgtcagtaactatgactggtttgaattcgtgacaatttatattgtgcgatgacatcaatcgtgatgaagttcaactgatactctttttggcttttttactgcagagatgtccaatcagtgcagcttttacatgctggtggtgtgttggtcaggctgaccgtaaatggggccgttgccatgcggccggatcaccatttatctccagaccttctgggaggacattttttcgtgtccaacacaagatcaaaatccattgatcaaaacaagctagtgaagctaatttcgagatcaattcactttcgtagaatcaaacgactaatttttacgataatctgacctgcccaaataaattacctactggccaaaatatgccacaaacactggttctccgcagcaaggcaacaatcttctcagcgaaatgaccccgatgggcagcattgtttggattaacaagccgctcgaccacagtacaaacgctgcgaggcagccagagaaggagatgagagttcattgttaccaggcccatatttaggggagaactcagatggaagaccacacaagccccattttttgttccttttcaattcaagccaatatgcgtttcaatatgcctaagagaatgttcttgcttcatttctttcgaatgaactctttttcttccactggtatggttgcaacacacttgttttccatagctttaataagcattcaataatattcatgccttataaaagaattgttacccatagagatgatgactgaatgtgcattcttgacaatgcaggttccattttttttgcttgctacgaaaattaaatcggtgtatatggacacaattctttgtgtgtacctgtttctcgtcgagtacaggtccggctctaggcctaggtcggttgtgtgatcgtctcaagcctgcagcagatgggagcccatcaccacgcaaaaccccatgcccaggccttagccctcaggctgaatagactccaagcgaacatcccagaatggaagctgcgtaggtggccactttaagaaggaaatgtggcaacagcacaccccacaaacccgttggttcgtcttcgatctaacgatctggctccttgtgcccgcggctagcgctttctctctgctcgacagcttcctgaccacgattgcaccatgcgacgagctgataagtcgagagtgaggggagtctagacaatggatttggacggaagctggtttgtgtgacgagatctaacagccatccagtcaccggcgtacttctgtactgtcactgctgtcatcattgctttaaccttgtgttgagggttggcgtcatatagtggtcaggtacagtatccaacacggtaccaaaaggggtgactgcagcaacagcattttgttctggcgtgacgaagacgttgtggttatcatggcgcgtctggatgatgttgttgtgaaccgagcgcccttgactagctagatcacgttggtaatcgtgatttaagtgttcttcggcttcttttcacgtaggtgttcttcctgcacctcccttcatatgaggcttctccgtcttcaatcgtagccataaagatctcacgaggtagagaaaagtcatctgaacaatccaggatatttggtgctccccatgctgcaacaagcatagtcatctgaccactcggagccacatatctcctccatgatgctgtgggagtccacaagtgggccaatcaaaactcgctacccctcccagggcccgtgctggaacggtgtgtgtgaaaatgtgaattaccagtgcaacaacggtgtgtgtaaaaatgttataaagcacataatcagtattcggcaaacccacattatcgccacaaacaacaatcttattcgtgaaacagtcgacggtacaagcaaacctgataagtgtttccatggtggaagccgctgtcaagggctaccatcctgcacggcgcatggcggcggtggcctcctacgcgaggagacaaatggcagcggcagtgcacggtgtggcgcggctgctatgcggtgtggaggcacacagtgctggtggcttcctcgggtggacgcagccacctctgcgtggaggcggatggcagcagcgatgggaccaggtggcggtggcggtgcccccacacgcatcgagctagacgcaggtgcgaagctagagttactcattggggtcagtagaccacgacgattttttgcgaatatcttgtaccagcactaatttaccggctatgactccagttaaggaaactactagaccccggtggtccaatgccatttttctgttcaagctcaattagcaactaaacaatactagtaagtagtaattagaaaattagctatcgcatataatacgacagcccgatatacatatgagatttgagcccagaaggaaagcaactcacacaagtccacaaattgccttgttgcgctgctatgtattcctgctttactccaaaagacattattttattatattatggtcccgttcttttctctagcaagagttggatgaagattaagattttcgtggtacgcttttcaaactgtgtaaacagtgcgtttcatacaaaaaaaactttctatatgaaagttgctctaaaatatcatattaatctatttttcaagtttgtaataattaaaactcaatcaatcatatgttaataccaccttgttttgcgtaaaaatcttaatctttatttttatcttcaggagaaaagaacaccacctatatggtcgatagttttgttttcggattatcttaagattattataagctatagtcaattaaagattattataagctatagtcaattagtggtgaccccggtgactatttttctggcttcgccccctggctagacggtggccaaatcacggcttagaggagggctgagggcctgaggcggcggatgggaggtgccaccaagaatcaggctcgagatcgatgcgacgaacaatcttcccattttccacgcgtgaaaccgactgaatgtagaactaaacggctgggcggctccacccgcgtgaaatcgattttcgctatcggccgactacccgtcagcacaaatgaattattttcaatggcttttggtcgttggcgggatagccagccgccagcgaaaacccatcttagccgccaacaaaaacacggttttttagccccactaaattttttacgttcggtcgtgcatttttaaatccaacattagttttcatgtttccactgtacacgtgatttgcattatatattttcccgtgaatcaatacatctaaagcaactactaaaccgatttttacgtgccatgtgaaaaacaggtgttgtacataggtccctgaattaattccactcgagaactccatgggagggttctcatataaagtgataccaagacaaccatgtgaaagaaatagagaatcgtgtcaggattatcaccccacgaaatcgatgtattgttagaggagaggctgatatattggttgtgcgaccgggataagtaaatcgtccgtcggagactggataggagggtgttccccaagcagttgttactattttcgagttcctgggagttcataccatgttctcaggaataatacacaaatgtcccaataggaatctcgtttgttgtatagtgatgacgtatatgttagacatggaaggcatcatgaattctaggtggccacatttccagagatctagttgataatttccaaagtaggattaatgatcgacaaggtagtcaaaagtgaccatgctatctagctcagtgatataatcaacgtgattttagaaacatttttttagtagatcatattattcacagaagttgggggtttatctcatctcgcatttttttaaagctcttctatgtttatttctaaactttttggctgtgtacctacgggtagatgccggagatgtaatccatttctattattaaaaaaaaaatctagctcagtgagcttgaggcacttcactgggcggctagatggatgaaatgaagctgcaaagaaatatcttggcgcgatatagcaaatgagcaaaaaattgtttttcttgttaaaaaaaattgtatgcgggaatttagttaatagtatttagtaacaccatgcatcatgcttgaagtctttatatatgcaatttgatttggttgccgaagtagtattggctgcacctagcataagacaatatgatagtatcgaccggcatgtagtaaaataaaatactatgcccaagtttttttaaaattcaagatgcaaatctggtgctctctctgttttttaaacctggggtgatcttatttgacaaagggattaagaatgataaagttttttcgcgtgtgaataacagcacaactggaataaccgcgggttcaatatgcagtaccatttctatattcagtaaaagaaaatcatagtgtgccgtgtgcgcatatatatacatctcgttgattctctttccaaaagcggagctcaaaagctcaagcccagtttcccatctcatatatatagtttatgttttactccagtacaagaacaacattggtgctcctcagacaaaattatcatctctgctgagagtaatttcgttgtgagttttggggaagtcatatcatggcctgaatcgaatttgcatatatgaatatcgggggcggagatatatgctattgctaggcatggaaggtatttggaattttggtcctctagggtttatttacctgagcatctctgcttcgactccctggtgcttctggtctcttggcagctgtgggaggtatgaaactatagggttttcgaccccttcccgctgcttggagtttgtgtctagccgtcgtagtttttttaaggttcaactttttattttgcttttcctcacttcccctggcataagtgttgtgtagctataactcttttcttctaatatattggcaatgcaatccttttacgcggtcacggaaaaaaatagaattttggattgtgaacattttagcacaagacatcacaattttgaaagttggaacgatgcttatatcaaccgtggtgaagcttgtggcaaagaaaaaccacaagacacattttccggccggttgaccaatcacgccaactgggcggaggtagtatatgttaggggggtgcccaggaatccggtcaagaaaatttttttagctatacctcatctatttcaccatgtatgcaccccctcgatacaaacttaggcacccgtatcagcttaaactcgatctaaaatagagtaaattaagcaagtggcaccaccctctgtttcgctctagctccgcccgccaagtgccatattaaagcttcaaagtacgcaggtgatcacctggcggggagtaaagtatgatgaattgatgacaagtacatgcactggctgcacataagctgaccaccatgatcgttgcaatacaccccgttacactactacaaaacaacacatgaagaccgatcatggagctactggtttgctaataccgatacctatgaaacttttctcaccttttttagcttaaaattaagaaccggtagctatcatcagtcatcaatacacgtttataacagaaaccggcaccaatagtccctaaaatcatagagacctatggacaacacataggtgctataataaaccggtacctatggacatagctaggtacctataagcgcgatagtatagataccagtttttatgttgaaacagcatatatgggtatcacatatgtgcctcttgataaaaaccagcaattatgagcacatagatgccagtttacagttaaaattggcacctatgatgacgtagttcatatatgtgtgtttttttatctaactttttcatataaagttgaatgaagataaactttatattaaatttgtagagctcaacgagatctataatttaattttgtaattgatgaccttttgatttaacgtcatttggatgtccgaaaatgtgttataatgtctcggatcaattttcgtaagagagtattcaagaaacaatctcagatggagaaaaatatatgaaagtagaagatctagatgaggtctacaatcttgtactccctccgtcccttaatatttgacgccgttgacttttttaaacatgtttgaccatttgtcttattcaaaaacttttgtgaaatatgattggaaaataattaataattacttaatttttttgaataagacgaacggttaaacatgtttaaaaaagtcaacggcgttaaatatttagcaatggagggagtagttaacaaaattttcgttcgagctcgtctatagtgttaaatatgaattataagtttggatcagagtggtctgaaaagatgcatttgtttccaagacaactaatgtttgagagaggtctttagttccaatgttgcttgaagcatatctatgaatatgggttgtaaaaatcatgggacttgtggaagggaaatattactgtataggtaccaaatattctttttgggatttttagcacctgcaaaaaactaaaatagttgcaaccggcacctatagtagcacttaaacaggtaccaatgacttgggtcattggaagttattggtgctggcaccggaaccagcacctataagccctttagaatcggcaccaatggacttttgtgaagttgtgttatattgcaagaattcagtgttttgttagtatgtatgtacgaggacagcattttttttttctttccatcccctatgtcattgtcatctcagaatggaaacaaggcattgcaaaacatggtgatgaacaggtatccgtgatttagtggtgagaaatatattgatcaagcttgaaattcttggacagaactgtatataatctgaagatacaaatatttcaaaatgacgaccaagtgcaacgctgaagtgtcattttaggaagcgagaacaatggcaattggccccgccgaggtcttccgcaccctgctcaatgccccttatgtcacgaagaggaccagactatacaacatcttattgtttcttgtgtgtttgctaggcaaattttggttcattatcttgcagcgcgttggacttgcggtgcttgcgcggttgcgccacaacccacggagaactcatttgatgattgttttagccgggccaacatcttgttacaaggggttatcagcaaacgattaaatagtctaatcattcttggtgcatgaactatttggaaacattcaaaacgactgtgttatcaacggggctgccccaggcgtttcagcttgtctagttcccgcaagtgaggaggcttgccttttgagtttagcctaggccaaggggcattcattgattatggaccgcagttagcaagactttatgttgttgggagagagtcctcttgaggtgctttattcttcttacgctttctttttatgttttgtgtttttgggttatttgtatttgcatcttggacgcatctcttcttccctaatgcaatgatacgctgctctcatgcatattcgagaaaataaaagcatggcatttgttgaaaaccacattaccatctatatttattttctctttgataaaccacatgaagcacaaaaatttaggcatcgtaggcatcatgaatttcgtcggagtgtgcatttatgttcttttggatcatgcggactgtactctctcccggaccgatcgagttcctctcaggctatgtttagatggtagaaaagttgggaagttgggagaaagttggtagtctggagaaaaagttacgaatttatgtgtgtaggaaagtttttgatgtgatgcgatgtaatggaaagttgaaaatagggggaaactaagcacggcctcagcaaccaggacaacttttgccaaggtcaaaggaaaaggaacgaaaggtgctagacgaagcctcctcgtagaaacaagtggcaagtgaagtctatgaatgctaattatgcttttaagtctaagaattcttgtaattgagttgatgaggccccaattttctcactgaacgttctagtgaacgatgtaattatgtttccagattaataaagcgcgccaaatggcttcccttaaaaaaaaaaacattgatgtaggtagaagaccagtttagaggcatctgctcggtttagggcagaactgtaatctaccgtctatcatgtttatctatagaaggcatataccatcaccagaaaaagctctctctggtatttattcgttacgccgatcctacaccaggccatcttgttacaactgctgggctttgtttcaacagtgtgtaacgaccagtaatcctgcacgagctagcacagtttccatcaagacattagacatactttctcttccaaggcgctgtaggcttgggaggaatcatgaacgatcgctggacatgctcaaccgaaggtgctacagagacatcaccaagaacgaagtacccattatgcagcttaatcttcatcacgacatggagagctgtgcagctacctcctttaggaaatcttccatcttctcgcctagcatgaccctcccttgttctctcttgccgtaagtgaggtactgatcagggatgaactagatccgttacaaaacgttgctcagctagagaacttatcttcgttccgccatatatatcactcggctgcacggggtgacggaaatatatatgtaactcgtttatctttttgaaaaaagaaacaaaaagtaccataaactggtatgaaagtcattatatcgtcagatggccgtacttcctatccatataatatgtagtcgtaatcactaattcctaatacgaaaaagtacgaattaccaccccgaactatcacggtcgattaaattagcccattgaaccacaaaaccagacatctttcacctcaaactatacaaactagacaattaacccccctcagcactgttctgagcaattttttagttgagcatgcacatgtacggcgccaacgtggcgatccaatcagcaaagaaaatgaaaaagctccatggacccacctgtcatccctctctctctccctctctctctcgcgcgcgcgcttgggcaaccgatagtggaggaggagctcggccggcttgcggtggaggcggaggcgaagagagctcgggcaacaggtggaggggtgcgtcgaggagggcgctgctgcagctccctactaacggcgataagagggcctctacagaccgcgaggagagaaggatgagaggggggagaggagttcgtttggccggcggtggagcgagccgcttcccccaaatccagccgccgccgtcctctaatcccctttggccatccgcgagaagctcgggcagaggtgggtagagctcgcccggacggccggcagcggaggtcctctcgctcctctccttccttcttctctgcttctctccttcttcaatctccctcccactcctcttctcactcgcgccaaagccaaggatggcaatgctccttcgcctccgccattggcgcccgagcgatctccgccttccccaccggtgcccgagcgacctttgcctcccccgccgggggaggccgaggaggagctcagctcggcagggaaggagactcacgaggagatgctggggcgtccctcgtcatcatcgtcattgtctgaggccgcggcttctccggtggggttatctcggggtggtaggtgaggagaaggaggagggggatggtgggagaaggggcggcatcgtcggcgaccacggcgagtagtggttgtagttgcgtcggtggtggagagaggtggaggggacagatcagacagtgggccccaccaatttttataaaagaattgcttactggattgccacacgtatgtcaagcaggaccaaaaccacctcatattgagtcggcgggcttttttgtcctgtttacataattgagggtgaaggaagtctggttttatggttcaggggataattcgatggaccgtgatagttctgtggagtaattcgtactttttcatttctaataatttgttttggccaaaccggagaggtactgtcacgcccggaaattcactagtaatttccgaacttatttgtgcataaaatcctcgtccaggaatcagccgaggtacacaaactgacaatttaatatacagattcatcaaattaactaaaatgataaatacttacttaagaggcacttagtcctcaccaagaagaaaactgcagcggaaaataaaatctagcgaagctccggctccactcccacaggcagctcaactggggtataagccaaacgtcttctccttcgagatcctttttattcaactgagattgattgattattgcaaggtgagcatatgacatactcagcaagccacacagcaaatatgcaagtgcacaaggataccaaaggatggcataatattggctcatttgcaaaagcagcatttagcaaaacatttaagagaagtaaaacagtggagtaattaatcaggaattttaatcaacactgaacagcacacccatgctgcacaggcccaaccattctgaacaaccatacccggctgaacagatctaactccaaaccaggagctaagcaaattattaccaggtataacatccataattattgtgagaggtgtgggactaatcacgaaaaacattgctcaactcgcccataaccgcgggcacggctattcgaatagttttactctgatcagaggtgtaccactgtacccacaagacacagcctcaacatcatgtctaccatacgtcgcgatactggaaagtacccgaatagaggctgtgacaataccctctacataacacaactcaccacagtgcaccattcctagatcataatcaccccctcaaaaacaagaggcatggactccccagcgacccccgtgagcttatctccgccacttctcagtctggtgctctgcaatgaaccatgctatacaaaaggtaaagccgttgcccacgctggcttgtggttggcacggttaatgtttcacaatagtagctcgcgaaccggtccttaattgtcatgagcacgactctcaaaaccatgtgctcacaacccaccattatcaagttttagttggcaagtaattaaccaatcactactgaccatcgtgagctaccattaaatataaccataaatgatagtgaaacattagttatcccaattgtgtgctaatgtttctaagcatggctaagcaatcatatctaatatctagctgaaccaatatataaagctcaactagtcaagttataatctcccaaggtaacaaggaataaagtaatcaagaacaaaagggccatatcaaagaataggttaattccacccaatggcattcgaaaataaatgcacagttgaaataaatagagaatttaaatataggatcaacatgttcaaaggattgtgtttaggatctgtgtgacttgccttgcaataatcggtcttcaattaatcttcttgaacacttccggcgcactcgcaaaccttcgcaacgacggaaacgacaagctaacacgcaaaacgaagaaaaagactaataaaaaccaaataaacaatacataaaaagtaaacaaacatgtagatcataattttagatgaattatgagacttgaacggcctcattctgacttcaaatgaatttattatgaattttacaagattaaatctaattaaagcccatttaaaaagaattaaataaatttaattcaatttatggacaattttaatatgtagatctttattttatataacttttgcaacttgaaccacattaaactgagttcaaatgaattagttatgaatttttaaagattaaatcggattaaaacacttatattgattttaattgaattatgacgcaataatgaattaattttgaaaaggaaaagaaggattattgcgtcagcggctagggtttgcggtggaccgggtgcacggcagcggttcacggaaacgaacggccgagatcaactctatccaaaacggacggccgagatcgatcggtccacgaccggctcacgggagagggcgacgatgacgtcagcgatgacgtcaccaccggcggcggcggctcggcggctcgggctcgcatgctcgccggcgaacgacggcacggcgacgcgaacggagagcaccaggacgtagaggacgacgcggcgaactcaccggtgaccaaaggaacggcggaaaagcaacggacgacgccggcgacgaggatgaagcggcggcggagatcgggtcgacggcggcgacggtgctccggcggtcttcggcggcggtgaagcggtggacgaggacggcgacgacttggcgaccacgatgacgacctccccgagcgacggcgacggctggagcgacggcggcgcacggctggagcggcggcgacgacggcggcacgagacggcacggcgctagggctctacggacgacgagaggcgaaggcgagggtggcgacgggtagaggagagctcgggggtccttttaaaggggctcggaggcggcggcaaaggcccacggcgaccggcggcgagaaggaaaggttgggctcgaagagaggaaagccgatccgattcgaactcgaatcaaactcattccaaaccgatttagccgaagtttccaaaggagaaaaggtagaggagatcccgaagattgtttcccctctattgatttcaccggagaaggaaagacgcggctgaatttggaaggagaaggcggcggcggccgaaggaggacgacgaacctaacaagcggggcccacctgtcagcggctgagagagagaggagagcggcggctcggcggactgggccggctgggccgagggaaagagagagagaagggttttgggccggactgtggagtaattcgtactttttcatttctaataatttgttttggccaaaccggagaggtacactatgccatgattttgtaaattcaatttgatcgtagacattaccagcttaagaattggagtggctaacggatatgcagttacaaaagcacaaaataggtcttaacttattttttagtacttccacgtggttctctgtcagtatatatagtacgtactgtactatcagtattatcactagtaacaacagtgctctaaccaattatttatcagttctacttgcgtaaaaaatattgttccaatgattaaggtggtaatgtaaatatatctgctccatcgaatgagaaaggatgaaattgcgctcgagattgattctactgcatgtacataacacagtgaaattggtgattttttcagtgtaagccatatatgcaaagtttttgcaaggggtcaggttgcatatgtatggacttacgagttgtgatggaacaatttgacaagataaatttatcctaaacttatccattcactacttcagtatctaaacttatcctcgttagcttgcaattacatagacttcgactaccttgataggttactgtattgaaagcaattcaataaattgcttgagaatcatatcatcaggtcttgagagttggaatcctatatatggagactagcagggtagcatttaaaaatcctctagtggtttttgaaatgcagtgggtagaaatctggggtattttttctgtacgatctgcaaattaaaactggcgttatataccattaatttttcaccaaataaatacacttgtcagtgctaccaactcaaaaaaaattgatgtattgctggagaaggacaagatgggtcatgctactacatgagggtgttcgccgcacatatgttttctttccgagctttccaaaaacggaaaattggaatcatgccattgtaataattttacaaaatttgagatatgccattctgacccacatatcattgactcatgtgggtcctatatgtcattgagataccgatggcatatctcaaactttgcaaaattataatggcatggttctaaattacccatctgaaaatcacatgccatgttctgaatccaatttgcccatgagctttctgaagctcgtttgggcggtgtatgtgtggttaggtcgttaggcacagaaggcatcatgatttctagatggtcatatactgtggccggtagttcaaatttgaaagcaaaacgcaaaatggagcgacaagatagtgagttcgtgagtttctggtgctgcattgctgtttttggaggtttattgggagtgtagtgtgcctctgccccccgtcccgctgatcggagttgcgtttagccaccgtagtagtttttcttttcctacctatagttgttttttgttttgccttttctttgtcacccggcataggcatgtttggctaattgcgttaggtaagaaaaactcttctaccttctaatatattgacatgcaatcattttgcgtgttcgaaaaaaattgtttctggtgttgcagtactgcaatggactgaaggaaacaccgattttttattaaaaactaggaaggtagcccgcgcattcgcgcaggcatgtatcgtgtgctgcatttgaaaacggattatatttatcagatagcctctgccatgttttggaagtacatttcctcagcaaatatttttcgttgacatcacgttgataatttctctatgctatatactatatagtatttaattaatctgtataagcaattatctatcatcttcatcatcatctaaaaaggagttagacctagtttgtttagaaaacatgtttattaaattaaaagcaaggtgtttttttcttttttttttgttgaatgctttgggccctgatggtaaaaacataagacagctaaattcattgttccttttcccctaccatacgattttcatgcagctcctagtcaccgtgttgagatgtggtcattgcacctatggaggttgtcttgtgattcatcgtacttgtgatcactttttttgtcaagcttagttactcctattttcatttcttgttatatcgtaaaatctaaatggactccaaagttaatcattaaagtatatatgtacaacaaaaatatatttgcagacaattaatgttcatatatagggatgattcaccttttgaatgatctatgcacaaagaaaataaacggaattacccgaaatgcttagaaggccagaacaacacacttgaacatataacaatgatatactaattaaaagtgcattaagcaccatctaaagtcaattagatggtaacatagtttagagcagatacacgaaagatcatttagcttgcttggattattttagcacatttttaaaaaaaatcatgaagtaatcagatattctctaactaaagccattggattttcgatgcattggtgctttggacttcatattttagttagtcctatttgcttagatagtgtatatctaatttagctatgcatgtttgacaaacaacatatgatgatgcaacctgtattggattatttcgtaattcttttacagcaattcaaatgacatgtaaaagggcagggatgttcttccttaataaaaaatgtttcatagttcactttgaaatttttgtttggataactattgatttaatttagctatacatgtttgcagaatgatgtatagtgatgtaatatgtgcagcaaatttgttttgatggtatgcaaagcgcgcgggatgaatgtggctgaatgtcatattttgtacataggaaaatataaggatacggatcttaaattcctagtttaattataaacagagcaacaattatattagaaatcaggcgtagattaaaaattatggttgttttaatatattaattatttctcttttagcttactcatacccaaaaatagggatgggattagcagtggtcttcacgcatgtgaagggggcgaggaggtagatgcgatttgtttttataacttctccaaataatgtaacttaaaaccaatgataacaggtttaattttttctcaaaatttctaagattatttatgattttcaggacaagacatgtggcggcgtaagattttttgtaaattaaatttaatggttgaaaataatggtccatgaatttaattgaaatattttataattttaaaatgtgacatatggtgacttaagtgtgctctaaaggtgtttaattggtttttattacgtagactgatttaatatgaataatacatgttttcattctattataatttttcattttcattcagtttccatgcaaaggagtattttaatttttatatagtaaaatacaactataatggatattgaattattcaattaattttaaataaaacaatagttaaaataaatgaaaaaaaataaaatataattttagaaattataagccatttagctttttttttaatattaggttgttagataaaaaatataaggcgagagattagaggaagtatatgtatagcaggacgagagatagagattttttttctgagacatattccaacggatcctagtctttagttatctatttttaaaatatagatataattttagatctattagaaaatgtgttgggtgttgtatttactaatataagctaaatgttgccaatcatatggtttaaaaatctaattgtatcgtgtgaccaataggtagttgctagcagcatatgacccaaagaaatacatttattttaaatgtagttaatgtaggtattgaattctaaattttattgtaaataatctcatgctgtgcatagataaaaaaaattgctatttagatggtatagttgttgaaaataatttattacaaaatatgtttttcaatattaattaagaaaatgcttgaaaataggagggcatgtcgccctcatgtattagggtgagggcaaggatatatgatacataactacgtacatatacctaacgtaatgtaatggatggcagcggtggggtgtgggcctttctttttcttttttttttaagtaagtcctatggtagaaaatatgggtccactgtatattagtgaaagtcgatggctagatgttttgttttttctataatttgctagagtgagacatggtgagatgagagcatttgtagaatgccatatttttaacggtttaagagtgtttctaggatgtttaatagacttttagtatattatagattatcaaacaactaactattatatatcagccccatacgtcgtgatgtatttaggaccacaatataacttttataatttaattaaagtacaacggaatcacaaattggatatataatttaaaaataatttagaagatagttcgaggaacattgattggatattttatattattattatagatcttagtttaactatatatatttatatttgtgttgtagtttttttagaaaacagatcatcgatttttatgatgtattattttattatcttttctatgtacgtgcgtactgtttttttcttttctttccagtgaacagtacgtaaactatttgttttgtttttgtgtaggtaagtacgcacgggagaaggacgtggtttgcatcgtatcaacttgtacgtacatggcaacaatagtagtgcttaaatcatacaaagagaaagttattattttttaataatagatctaatccaatggtgtaaaatggcggatccaccaatttaagtgaaaatcgacggtgagatttgataatgccatgtggcggtctaggagcgtttgtaggacaccacgtggcggcttatgagcgtttgtagtgttaaatagaccatagaatttatatactaaataaaaatgactatcatattcaaacagaaatcactttgtctcaattttatgtaaactcgcctatcaccatcctccgcaagatttttttttcttttattatacatctaattcacctatgtatgtttatgggtaatatacgaaggaataatttatattgttgaaattatttgtgctaattgttaatgctatttacatgagaacgacataattaaaaatgatattatatggggtagggtatgcgtatatgtattcatggagtgagtatgtacacgtttatatgagcgcctatgattacctttacaatattttaaaaaatctttcaaaaaaattggtgggatggcgtgaagtggcgccatagcggcgttgattctttgataacatcgccaggagtggttgctatatacatatataatttgaagaaaaccttaaggctataaagagagaaacagaaaactaccaagatgggacagatcgtatgcactcttctctttttcttcttttcgatatctcttgtgtgcatacgtacatagggatagattagctgatttttagaagcaagggattagaatatatctaatctaatggttgaaaatggattcatcggtttaagtgtaaattgatgaccagatgttttgcctttttttcttatatttagcatcacatagcatcttaggctgtgttcggcagtgactgttcccatcctctcctcctcgttttccacgcgtactcttttcaaactactaaacggtgcgtttttttacaaaaagtttatatacgaaagtcgcttaaaaatcatattaatctatttttagaaaaaaaatagctaatacttaattaatcatgcactaaatactgctccgttttgcgtgccaggtagtgagggttgggaaccctcactcccgaacgcagccttaggagtatttgtaggagtgtaggaatgctattactcatactcacaatctattgtagtcaactattatttgatgtggcttggtggcactctctatttatctatcatttgttcatacatgcccttagcctgagtttggaactgagagttcccagctctcctcactcatttccgcacacacgtttctcaaatggctaaatagcgtgatttttgcaaaaaaaaattctataggaaagttgctttaaaaaattatattgatatatttttcaagtttttttaggataatacttaattaatcatgcgctaataaactgctccattttccgtgccagcgggaaacattcccaactctaacgaatgaaaagcagcattagtattgtcctttatcctctgtgcttcatgacaaacgtgttcattggatgtcagctaattattagacgcaatgtgcatggataccatgtaagcaatatgacttggcaattggtggatagtggtttgtatatagaacttagggataaattagtggggacattattgaaaaattatatattgtatgctacatattagttttagtacatacgtaatatatttatagttaagttctaaaacacttatctgattggctactcactttgttattgtgactacgtttaccgaattgctaaatggtgtgtatttgaaaaatattttctatacaattttttttcaaaatcaaataaattcacttttgagtttataatatttaatacttaattaatattgcgctaataacctacatcgattcgtgtgccctggacatgctcaaccaatgagctagatggaacgaaggctaagtaggagataaagaacatcaatatggtgtcaaaagaatatatttattctttaattttctaataatatatgaatagagaaaacacaaaatacatgaaaagtgaaaagtacatttatgataaatttagaagtgtcattttgatatatgtgtattttttattgttggagttatttttttcgaaaatataagtcgtatctaatttaactattatataatctacatttttcaattcatttatgtttttcatggatttttcgatgacatgtgtctaattagaatacaactcgaaataacatattccctctatccaaaaatataataatttttcactatgaatcgggactaatacttgttcagaattatagttaaaagttagaatgtagtacatgaaatagcatagtacatgtgtattattattcattatggttttactatatttttattgttttgttgttatttggttgtcacgcaaatgtcaaaagtatgtatatctttaaagttagaagagtattttcttatatgtggatttaatggtttcaccggttaaatgttatggatctacagatttaaatgcaaattaatagttaattgttttctttataatattttttttaaaaaattaaaatattagatagaatataggaaggtgagagagaggattattggacgatggaggaagtgtgcgtgctcatgtgcgtgcacggggtgttcggagggattagtatgcttttgaactaatctaaataggaaaaaaaaagatgtgcaaacgggagtacataagtacgtacatacgtttgtttttcttttttggcaggaatactatgcacatacttaattggtagtttctgatagatattttccggaatacttacgtgtattttttagtagatgtcgatgtatatagatctaattaaaattggtataaaatatcaggtccaccaatttaaatgaaaatcgacggcaagtatagatctaatctaacagtataaaataacgggtctactaatttaaatgaaaatcgacggtgagaatagactgtgccacgtggtggactaagagcgtttaaagatagaacgtttaaagagtattgattggatactttatttttatattaattttcgtaaatttatagagtagtatattttatttttaaattgtagaaaatcctaatttatgtaccatcgttttttttaatgcactacgtacctatgtttactttttttttattacgcagcttcttttcctgttgtacgtaattacggaatactttttgattggatacgtatacggagtttttgtttggtttcccggcccacagtaaacatgagaaaagtattagtttctttaagaaaataatacatccaatctaatggtctaaaatatcgggtccaccaatttaagtgaaaatcaacggtgagattaaacaatgctatgtggcggtctaggagcgtttttaggagcgccacgtggcggcttaggagcgtttgtaggaagtttaatggacttttagtatataatagaaagaatagaatagatagaagatagatagatagatagatataatagatagatagatagatagatagatagatagatagatagaagatagatagatagatagatagaagatagataatagatagatagatagatagatagatagatagatagatagatagataaccgatcccttcataggagttcagttatagtaatatttacttgcaggatactattctcattgctgcagtactgcattggtctcaaactctcaatggacagaaggaagctcagattttttttattaaaaaaatcgatcccttcatgggagtttagtaataatatttacttgcaggatatatactattctccttgtttgcacttcaaattattttgcacagtctttagactagcatcgaatatgcaaaattaatggagtaaagacctccataatttcaacaagtgactagaaaggcattacaaattcacgacgactacttaaaattttgttgttctctaaagttcagactaagtgcaaaactaaaggtctggttttgtatctgatggcgctacgaatcaagtgcattcacaatataccaaccagtaatactggtgatataaggtttggttttggttttggatgcagttggtgatgtaccgcaaaagcccagagtttcgataaaatattactactgaagaatacatatgctttcctgctctcagtgacaaaattgagatgcacataggcagatcatgagctacactgtcagatcacgagatcaccgaacatatcctcgttaggtagcgatacgtagatctgactaccttgataagttgttggactggaaacaattgaaaaaatcgcttgagaataatatatactccctctgtattgtaatgtatgacgccgttgactttttaaccaacgtttaaccactcgtcttattcaaaatttttatataaatataaaaatacttaagtcatgcttaaagaacatttaatgataaatctagtcacaataaaataaattataattacataaatttttttaataagacgaaaggttaaacgtttgttaaaaagtcaacggcgttatacattaaaatatggagggagtaataggttgagagtagggaaactttcagttggtggaaaactagtggaaaaattttttgggtgcgaatcagtacataaaacggacgacacgaacatgaatttcagtgaggaatcccatgtgaggattttcagaaaataaatatacacttatatggcaatgtgaggaacggtcttgtcagtactaccgtcttataaagttttgctggacgaggatcaggcaaacatgttttgctggacgaggatcaggctcatgctacatatgttccccatacatatgttctctttgggagttttctgaaaatcataccacgttctaagttcaattttcacatcccaaattgcatgtcatgcagagatataagtgtgttaggcatggaaggcatcaggatttctatattctcatatactccggctcatagttcataaatttgaaagcagaagaaaaagtggagagagcagtcattgagcttgtgagcttctggtactgtggtactctctccgattcaggttataaaatattttgactttggtcaaggtcatactgctccaagtatgaccaagtttattgaaaaatagtaatattttcgatccaacataaatttgtttttgaccaagtttatttacgatgacgaggcgccaccgccgactccacgtgcacgcatgtaatgtcccgattttcgttcggtattaaaaatcattaaataatgcatttccagaaattatattaaattttaaataaatttaatcaagtgaattattgagggaattaaaaattttctttaaaaatcattggctggaaatattttgtaatattcgctgtgccctaatatactctccggatttttccacaatttttcggagctcaagaagtaattataataatacaaagggcttgtttggtacaactccaactcctaaatttagctctaggagttaggtctggagtggagttgtggagctgcctaaacacaactccacaactctagttcattttgtgagagagctccacccagctccactcccatttttggtggagctaaaactatttggctgagctccagctctaggggggtagagctagagttggagttgtcccaaacagacccaaagttcatttaaccaattaaataaaaaaacaaataaaatacccatccttcccctccttcctcctccttgggccaatttcagcacaagccaatcaccctctcccctccttggcccgctcggcccccctcctacctatttttggctgtcggcccactttccctctgcccgcacaactctaattttcctccccctcgggctcctctctctccctcaggccaacaggtgggacccgtggaccccacctattatccccaacctccggcttcccaaagcccaactcgccattgcagccacacgccgcagccaaaaccgctgcctcccgcattccacgcgcctgtccaaccgtgcagacgaggccgccgcctacttctccacttcctgccccacttttgtccaaaaggtcggcgtcggtttgaacccctcatgctgcacatcaccaccccacgtcgtcggccgattccgtctcacccgacctcgattccacactcttgcgcccatgaaaagcatcccccgaccatgctctctcgtttcccctccccgcccggctttcccccgcactctcccgttctccccacgcgagcacaagcgtcgtcgctcgccatcgacctctggacgcacgccaccgccgctagggtcaccgccaagccacgccaccgccaccattgtctccgccacgccgagccacacctcggcatccgctccacctctccccgtatccctgccggaaccacctccgcaccgagcacccgagccacctccaccatcgccacctccagccacgccgcgccgcctctcatgtccacatcgcgctgcgtcgtcgccttccccagcaccgcagccaccgtgcgcagcccgtccacccctccctcctcgcgaaccatcgcgggagaccgcttccctccgtccaaggtgagctctgccgatccttgccgcttccgggcgccatttccctcggtgccgtgcctcctcctcgctccctaaaccccctgtctccttccccaggttcttccggccgctgtccgccagttcccgctcgcggaatgccgccatattgccgttgccgcgcctccccgaggagcctgccgccgctttcccatcgtcttctcgccgttgcgcgagcacggtgagcacccctccctctccctctatctccccttcgttggctgcctcgtgcgcgccgccgccacaggtggccattcagccaggctgctcgccgtcgtcccgcgccgccagtggccgcgtgccgccgccgtaccatggctcgcctgggccagtgtcacattctgatttttgtttcagggtttataaattatttaataaattaataatagaatttatattaagtgttctttaatttgcaagtgaagtaaaatgtgggaaataaaatttcctaaatataaagcatggatggatttaatttttattaaattctccatgattaagtcaactctctgaaattttctcggatttttcagagctcaattcctaaatgatacaaagaacagttcagtaattatttgatcattaatgatctaattataattgttaagtgcttttcttgtttaaaatccttaaattataaattgttgtttaaaaggaataattagaaataattttaaaagcttaaaagagaagatctaattttaatttgctaaatctcaatataaaattgggctagataaaattttgttaaatactttgcttaattctataattcctagatttttctgggatttatttgagctaaggaagtatttttaataaatggaattgcatttaagaaataatttaaattgaaaaatgtttttaaaagtctgttttggctttgggccgaaagccggcccaaaacctctctctttctctctcttctccccggcccaagccggcccgcagccgagccgccgctctcttctctctctctcagtcgctgacaggtggggcccgtctgtcggtttcgtcgtcctccacgcgccgccgccgccgcccgaaaccctagccgagcgccgccgccgtctccttccaaaattcggtcgatcctttccttctccggccgtatcgtttgatgggaaatgatcttctcgatcacctcttccttttctcttttggaatcatcgtctttttcggtttggaaatccgtggattcgaagtcgaatcggatcggcttttctctctccgagcccgacctttccttctcgtcgccggtcgccgtgggccttcgccgccgcctcctagcccctttaaaaggacccccgagctctcctctatccgccgccacctttgccttagcctacagtcgcgtctagcgccgcctccgcgtagccctagtcgccgccgtcgttgccgttggttcagccgcgtcgcgccgccgttgcagccgccgtcgtcggtcgccgtcgccaccatcgggttcgcaaggtcgtcgccgtccccgtctaccgcttcgccaccgccgaagaccgccggagcgccgttgccgccgtcgacccgaaggttgccgccgcttcttcctcgtcgccgccgccgtccgttggtcttccgccgacgttttggtcatcggtgagttcgccgcgccgtgatctacgtcttggtgccctccgtttgtgccgtagagccgccgttcgccggcgagcgtgcgccgtccgagccgccaccgccggtggtgacgtcatcgctgacgtcatcgtccccgtctcccgtgagccggtcgtggaccgttcgatctcagccgtccgttttggatagggttgatcccggctgtccgttcgcgtgaaccgccgccgtgcacccggtccaccgcaaaccctagccgctgacgcaataatccttcttttccttttcaaaattaattcattattgcgtcataattcaattaaaatccatataaaggttttaatccgatttaatctttaaaaatttataactaattcatttgaactcagtttaatgtggttcaagttgcaaaagttgtataaaataaagatctacatattaaaattgtccataaattgaattaaatttatttaattctttttaaatgggctttaaatagatttaatcttgtaaaattcataataaattcatttgaagtcagaatgaggccgttcaagtctcataattcatctaaaattatgatctacatgtttgtttactttttatgtattgtttatttggtttttattagtctttttcttcgttttgcgtgttagcttgtcgtttctgtcgttgcgaaggttcgcgagtgcgccggaagtattcaagaagaataattgaagaccgattattgcaaggcaagtcacacagatcctaaacacaatcctttgagcatgttgatcctatatttaaattctctatttatttcaactgtgcatttattttcgaatgtcactgggtggtgtgaacctattcctttgttatggcctgtttgcattgattactttattccttgataccttgggttattataacttgactagttgagctatatatattggttcagctagatattagatatgattgcttagccatgcttagaaacattagcacacaattgggataactaatgtttcactatcacttatggttatatttaatggtagctcacgatggtcaatcgtgattggttaattaattacttgccaaataaaacttgataatggtgggttgtgagcacatggttttgagagtcgtgctcatgacaattaaggaccggttcgcgagctactattgggaaacattaatcgtgccaaccacaagccagcgtgggcaacggctttaccttttgtatagcatgattcattgcggagcaccagactgagaagtggccgagataagcccacgggggtcgctggggagtccatgcctctggtttttgagggggtgattatgatccaggaatgatgcactgtggtgagttgtgttatgcagagggtattgtcacagcctctattcgggtactttctagtatcgcgacgcatcgtagacatgatgttgaggctgtgtcttgtgggtacagtggtacacctctggccagagtaaaactattcgaatagccgtgcccgcggttatgggcgagttgagcaatgtttttcgtgattagtcccacacctctcacaataagtattgatgttataactggtaataatttgcttagctcctggtttggagttagatctgtacagccgggtatggttgttcaggatggttgggcctgtacagcatgggtatgctgttcagtgttgattaaaatttctgattaattactctactgttttactactctaaactctttgctaaatgctgctttcgcaaatgagcctatactacgccatcctttggtatccttgtgcacttgcatatttgctgtgtggcttgctgagtatgtcatatgctcaccttgcaataatcaatcaacctcagttgaagacaagttgcgaaggagaagacgtttggcttataccccagttgagctgcctgtgggagtggagccggagcttcgctagattttattttccgctgcagttttcttcatggtgaggactaagtgcctcttaagtaagtatttatcgttttagttaatttgatgaatctgtatattaaattgtcagtttgtgtacctcggctgattcctagacgaggattttatgcacaaacaagttcggaaattactagtgaatttccgggccgcctcgtgcgcgccgcctcgttggccgcctcgtgcgcgccgccgccacaggtggccgttcagccaggctgctcgccgtcgtcccgcgccgccagtggccgcgtgccgccgccgtgccatggctcgcttgggccagcctgagccatacccgcgcctcggccgcccactcccacacggttggattcaccctcgggtgaatcccggccatccacgtggctgtcgtggtgccatctcgcatcggtgccacctcggcgccacgtccttgccacctccgacgcttgtccgccgtggccaccacgtggtgcacccacggacgatgcgcgcttggacttggtccaccgtacgtctacctcccatgagtcaccgacgggtggggcccgcttgtcgacgccataaataaataataattgcacaataattcgataataattctagaaattcatttatgttgctcaaaaattcttacattcataataaattcattcgaactccaaattgagcaactcaacttgcaaaattcatctaaaattgagctctacatgtttgtttacattttatgtattgtttgcttggtttttatttgagtttttcctcgttttgcatgtcagcgagtagattccgccatttcggaagtccgcggtcacgaggaaaagagtccagaagatttgtttgaagaagcaaggaaagtcacacattccccttgagcatttgtatcctaatttacaaatgttttatcatttgcaaataaatatgcatgttttgctaattacatgggattagagtttacctatctgcttgcttgtgtcatatttacttgatgtctgtcctttgtcaaccttgggtaacttagttgatgggataattacagtattagacctcttagtatctagacgagctgcgtgctcgggacatccggccatgtttcattggtcataattatccaactaaaatgtgactgaatggtaggctgtgggtgcatggttttgctggtcacacccagggcaattggaccgattcgtgggaaaccctggaagacatacaatgcttgccacaagcgggaataggtaactgcctgacttgaagtatagctttcctctggctgacgcatccaggcaagggtgcgcgtgatggagcgggatgggctctgcgacggcctttgtcgcttccggattcacctaggcacgagaggggactgcccactgcctgttgaggagtggggggtgaaacctgaggtgtggtgtgcttggtcagagggggttatatgaagggtcttgtcacaatcactcagcatggtgacgtgtccggctaggcgcgtgacatggcggtgggttgtgtcttgtgggtacagttgtgcacctctggccagagtaaaactattagaatagccatgcccgtggttatgggcgatcgaccagattcaccgtgattagtctcacccttaataaaacgggcgacacaaacatgaatttcagtgaggaatcccatgtgaggattttcagaaaataaatatacacttatatggccatgtgaggaacggtcttgtcagtactaccgtcttataaagtttatgttttgctggaggaggatcaggctcatgctacatatgttttccatacatatgttttctttgggagctttctcaaaatcataccacgttctaatataagttcaattttcccatccgaaattgcatatgtcatacagagatatatgtgtgttaggcatggaaggcatcaggatttctatacggtcatacactccggctcatagttcataaatttgaaagcaggacaaaaaatggagagagcagtctgtgagcatgtgagcttctggtactgtggtacttcattagtttgggttgataggaaggaactgcgcaatggcaaagaacaagcccaaattggttgtattgaaaagaacattccttagtggaaatcgagttataatatagagtagaatggtactattctcttataaatctttcaaattgatttcacttttccctgttttggacaagcatggtatatgcacaaattttattgcgtaatagtctgcataattttcaagctagctaccaggaaggaacttgacaagcattagcaactcacgactatttcttgggatagtgatgttctatgttcgagacaaaacgcaaaactaaaactccagttttgtatttgagatggcactgcccctgttcaaattacaatgaggtgcataattttacagcgagtactggttttggtttgggttttctattgatgttatttttggggggagtgctgctgatgtgcaaaaccccggaatttgattaaatcactactgaaaaaaaatacagttgttttagtgcactgaatgacaaaagtgagatgcgcgcccaattcctagtgaaaatataaccctttcaattttaatgaaaacgggcgaaacaagatgataattccctgaagtaaaactaaatcagatcctcaaaggtcatgagctaaacgacataaagaaatgttgtgagtaatatttttcaggcaaatgataaaccgtctccaataatttaaaactgaactaggaaggtatcccgcgcatatgcgcgggcatgtgcgtaaaatttttttacgaatgtccatgtgtggattgttttctatcaaaaatattctttcactttatcataaactaaaattaaactaattcgacgtgctttgaacgctggttacttgaaacatataaattgaactaaaattactttaaaccgtgttgtttctaatacatgagaaaattttgtgtcgaaacaatagatgtgttccctatgaatgtccaattatttttgttagattctgtttgaaattttaaatatattcattttattagtcttgcaaaaatgtttgaatatttctatttagaatgggttataaacccaacaaaaacaaattttaaattagataaattttattttattttcatttctttttatctccatttttttggataaatccactttatgaagcatcttttgaaatgctttgatctctgtaagtcagaatgaaaatatatgtgggttgatcctacaacctgccatggggtaaaggcatcaattctaaattatctcgctccaattaagtaagaaaaaaataaaatagatgttgtagtattttcttagaaaattaccactaaactggaatatcatgtaataattgcatatttctagattgttctatcctatatgtcacaaattcacgatgtactgtaggaagttttaccccaaaaaaatagatatggtcttttaatttctatctgtaattggcttatatatagctgaggccacatcatggttgtttcattcttaagattccttggtgcaaccaacgtgcccagtacaatcggtttgttgttcaactggccacgtgacttcatagatcatataaataatttagaagctatgatcattttatgattatttatttatctcctgaagtgatcatttattgataaaagcatcaatatcaaaatgtatgggtaaatagcttctatatataagctgagaaaaagttgatagaaagtcgttagatgtctatcaggatataaataatgggtcaactagttttataaaaaattgagctgtgatattttgatttttagtgagcaattttagtattttcttttctttagggtaaaatttgctataggatattaaaaaacatgtaattggccgagagacaccgtaagaacgcgtatctgttgtggcacaccgaaaaaattggtaattagctactggtggctcacgatattattttataatatccaaaggaaatgcagagagagacaataacaaaagtataactatttcccttacctactaagtctgccttgcaaacatcttcgacgcagcaacagcacccgccggtggtgaggtggctctctagagaggggggagggggtcaaggagggcccgtgcacctgggcttgtggctccatgtcatttccacacttgttgccgctacagtgtgagggctatgctggcgctgatgctccgccacacaccacgcttggggtgagcacaacgtggaccacctcttaattcatgtcgagtagggtgtcacagagcgcaggctattgttgtcgatctcggagtcgtggcacgccacgctgccataccctccaccgcccatgtcgtgactaccacggcgttagagcgatatgcgagccgcacatggcaggaaggggcaaaatcatactttcgtgattgtttctctccccttttcctttggatataacaaaataataccacgggtatctagtagctaattaccagttttttgcggtgtcccatagcagatatacgttcttgcagtgtctcttagctaattatactttttttgggatgtcctattgtaaattttacctttattgagaagaggcttcaatatggatgtgggttcataatgtaattttttgttaccagttaatatagtcaatatgggcattaagttattgttttcacttagaaaaataatagttggctagacctaataggtggagattagtttgtggtcttttctttgctcataaaaataatttaaattttaattatcatagagatataaaagctgtgaaaagtaatgctgcacactgcaagtgaacggggatggaggaagggttgagatgtttcttttttttagaaaaatattgattgatttgatgatctaaaataatgtgttgatgtttaagtaaaaaaccgatggttggatgttatttttttctcagatttattaggttttttttctaatttaagtgagacaagtatcagcttagcaaaatacccatagggaaggagaggaaggagaggaagggaagatggtttgggatgttttttattaagaaaattagatacaataacgatgtaaaataatgtgtgtatcgatttaagtggaaaacaatggatggatgtttctctaatttaacattgtcataccacgatttagaaatatctataagatgttaatggactttaacacctatttttgagattattttcgataaagttaatttttgttttaaatgtgacaggataaaaaacagaaaagaacagggagcctactaattgatcactctagcgtggtggactgtatgggggacgtgggtggttttggttttctaagatagatctaacgataataggttcaccgatttaaataaaaatcgacggagatttatctattttattagggtgccacgtggagacttgagagtatttatagggtgccatgtcacggtttgagagtgtttgtaggatatttaatggattttgaagtataagatagatagatagtactacgtacatatggtttttctctttatcttatatggtagaaaactatattttatatttttctcccgattatgctatgtaccttttttactttatcacacatatattttttcttccgacgaacggaacataggctttattgtttttttgggaatcatcgtactgtacttatgattttttgttttgccgacggtacgtattttcccttttatacagggaatgtattatatacacacctaatgattcgtaataggtccaccaatttaaaagaaaatcaactatagatatagatataatctaatggtctaaaaatgatgggtccaccaattaaatgaaaatcaacggtgagattagacagtgccacgtggcggcatatgagtgtttatagagtaccacgtggtggtttgagggtgtttttagaaagtttaatggacttttagtatataatagatagatgcccgacatattagaattcctcagcaataggaaaatataaattataaaatatatcatgagtagtttgatgcatatgttatattaatgttgtttttaatgctgtagtaatttgttattaaacctatttggcaaagaaaaaaatgtatatgttaattgattaaggaataattgtctaggaataccaatcaaatagtaagagggcttgtagaagcgtcgtgactatatttgaattttattgttatagtatagaaaatcctaatttaaaaaggccatctattttgttttcgatggttttagcaccgtacttatacttacttttagggttttatagttcttttttatcgtgcttacagcatacatgtgcatgttccttttttattcacgtgaatggtaatatctcaatgttttttttttcttgatagctttttttcatcgtatacgtacgttagttgttttttttttcaaacgaacagtaccgataggtatatctttgtacgttcgtacttaatttctggtaatctgattctcttagtatatgtaggaagtacaaaacaatgcatataatctaacggtctaaaataatgggtctaccaatttaagtgaaaatcgacggtaggattgtagaatgacacatggcggtctaggagtatttctaggagtgccacatggcagcgtaggagcgtttgtaggaagtttcatagatttttagtatataataatagatagataatagatagatagatagatagatgacagttgggtgaacatgaccattccgatcacagcgtgcatgcaagcctgacgcctctcagacctttcgaagtaatggacgcagtagcatatgcgaacctaacaacaaaattaatggccaactacaaaagttcaggaaagaattcccatcttatataagtgaggcttcactggggacgataaatgcaatgttgctaccggggagccattcgacagactctcagttgcagggtgcttgcttgccacaaggatggtttgcatatggagttcttcagaaattatatgtatgccacaatatgaattcaaattccactctctatcttgcaagtgataaacagaggtatattataggtttggaaggcatgtggaattttagatgcccatcctggagggtgaggactcttgtgtgcgaccttgggagacagtgatatacaacatctggtttgaaggaaggaaagatacacgagaaagctaagcactttggctcccctgtgcctcgaagagtataactttaccgtagtggcagagcaaggtgtacagctgcagcaactgggaatgacagccacagggctcagcggctcaggtattgtgtgcctaaccacgatggtacatcaccgccatattatctcctgaatgaaagagggttttgttgaacaattgccatgcttcaactcttgtttgatgaattaggcagatggaaccaatggatgtctgcttgggtgtatttttcgagcacggggatggcgacatttttcaaaaatttcacataaaccaatcgatgttttacacgcaaagttatgtaaacattaaaaaaaatcaatttcaaattcattgtggatgctgatgtaaagagaatttgaattgaagtagatgtacaattacttgaaatgttttgtatcttgatatctgtcttgaatgtaaaattcaatttttctggtgaacgtacatctgctatttaattaactttcgaattttcagaacacggcgtcaagatgtagtctggaatctcccaaggtggtatatataacagctcccctgagcaccatacaatgtcctccatccgtttcacgatataagtcattctatcattttccacatttatattgatgttaataaatctagatagatatatatgtccagattcattaacatcaatatgaatgtggaaaatgctagaatgacttacattgtgaaacagagaaagtatatttctgtagatatataatacattcaaatatatgatacaagctagattgcgacgaaatgaattgatattgctgctacagtgcattgaatattggcgattcatctccaacatgtcctgtcgaaacacataggacgcattagttggtccttaatttggcaccacgataccgaacgcatgtatcatgtgcccgagatactatatagtataattttttgaagcttacctgaagattttaagtaaaaaggtcactggcttcttttattgatagggttagaggaagtaagcttatttctagagaacccttttatagaatagttttcatattttaaatattcatacggattatgctagttcattcaccatcacggttctaaaccataggaagatttattgtagaatcatgtgatgcctaatcttggtgatgaacaattgtcaaagcactggtagagaaattaaccctttttaatcccagttcgcaaccccctgtagtctcggttatgcaaccgggactacgaatctgggactaaacatgcccatctttaatctcggttgaaataaccaggactaaagattaagttccggttgaagttaccaactggaagtaatgattttttttcttttttttcctgcttgcatgatttcgagcaacacaaatcattcataaaattatccacaaatcattcgaacaccacaaatcattcacaaaatcccgaaatacatcaagctgtattttctttatatccccaaatacatccacatatcacacatcgcacagatcagaaaagaattcgcgtcgaacagatcggccacacacattgcacagatcagaaaaaaaatccacatcacaaattttacagatcgggcgctggccgtccgccacaactcgccagcctcccgcctagacgcctatggttccaccaccgcctagggagcaccgctgcccgccacctcggcggctggcgcccgcccactgccgtctccccggtgcttccctcctcgtgcgatggccccgccggccgtcgccgcgtgccaccgccgggcgctggccgccgcggccctccgctggctcgctcgatctgcagcaaagaaagatgaggagaggataagctccatctgaagaaggagaggataaggcaaagaaaaagataaagagagagtaagaataggagatgaggagtttgggaggataagtcctagggattatatatggtacatcgaattttagtctcggtttatgttaccaactgggtcttatgtcctggttgataacacaaaccgggactaaaggtccaaactttaatgctggatggaaactccaaccaggactaaagataccggaggggcctgactgcccctaacagcatgtgaaccgggactaaagaccatctttcgtcccggtttttattacaaccagaactattgtggtttttggccaaccggacaaagatggtttctccagtagtgaaggtgagtgtttgttgaaaatacagtgaatagtatttttctgtcggtgaacaatatggttagtactaggccggtcggactaaacagtgagcgccagtcagaccagaggtgttcaggcggtctgatcgggtaacccgacggttagaccggcagaatccgggagggagtcggttttgggttgttttcatggattttctagattgcttcatgtagatgacttctaaatggttttctatccgcgtgcgatactattgtgtgctgaaatgaatcaagttggtccaaaatttttacctggatatagagttgctttgtttttcatgtgcaagtgttacttgaggttatgggagtatagctcgtgatggatcgagacttacatctgctatttgttgtcatatttttagccacatatgaaaccgaatatggtaagggcattatccatcagtatcgctctgttttcatcccaaaattgaaaacctcagaggattgtgcgggcacagtgatgcctccacaagcggatatccaaagttatatttttctggtgataagattccctttgtatgaatttagttattgttcttcctaccagggtatatcctgctttaaatcctttaattataattttgataaacctatataatgggaaacctagtagcttgctagttgctcaacaacaggtgtgcggtctgctagtagggaagtagtgtccttcccagaataagaaggcattgacgtacgcctatgtttcgtttttgagttctcaggaaactctaccatattgtgaatgtccatattgcacatgtcatatgaaggtatatatacctgcattaggcatggaaggtatcatcattgttgatgtcatgaagtgttggtttaatttattgatttcaaatcgtgcttgacaatggagaaggcttagtacgtagctgtgggatcaagcattaatgcgaaaaacttgcggtgctgctttgggcctagctaatggatgaaaaactgaaattatattcactggcttctctgaactatcgttttgaaatccccgaaattttgggaatgtcctgaaaactcactacagtccgtaccatttagccatgatgttatttcaactcaagtaaagttcataacagtacctagaaccaaacactgtgttcgttagttctagttgggaacccatatatcacgcacggaaaacggagcggttcattagcgcgtgattaattaagtatcagtaatttttttttcaaaaatggattaatttgatttttaaagcaactttcgtatagaaatttcttgcaaaaaatgcaccgtttagcattttgaaaagcgtgcgcgtggagaacgagagaagggtgttgggaacctgggagtaagaacacagagaaaaacacactattgtccccttcaaccaatactttttagtgtttcccacaactccgctgtttggaaaattatgatttcaatccaaatgactctatccgaactacatatctcatgtgaatctttgttctagctaccaaatgatttcatctgacacacagtgctttctcaaacttctggtggtataatttgatagaggaactaagtgattgactaggaattagtgtttcttaagggcgtggtacaactaggactgctgcaacagcacttttgcagtacagaacagaagtaccatgttttgaacatacgaatttatgctcaagtacaaatgttcatctcttcaattcttggtcaggaattcgatgtaaaattcttacctgacaaatttttgtccaagtacaaatgtttgatgttacgattaccaaccatcgtataagtgatgttttaccgatgaggatataacagtagcagtgctataggaaaaggaacattcttcatcgtcttagacacttagactcaaagggtggatgtttgcttagatggatgggttgtatggaagagttcttcagaaatcatggtatgatctgaaaacaaatgcctctctccatctttctcgtgttgtatataggtagcactgtctagtcatggaaggcatctggaaataatgatagatggccacacatcgcgacgttagttgcttgttgaactgatgggggatcaaaatattccatatggtctgatggaacgaaatctgcacagggaaaacttgaagtactttctctccttcataccgaacgttatgacatgacctcatagccagtatccgatcgataatataatggccatcgatcaattgaagagtggagtaccacaatgtgatgtatgtgagttgattcataatcgccatgactccctgctgatgatttgtttgtttgccagattgttttaactccaccttgatcagttagtcagacggtgagacaagtaacaggttatgtaaaacagaaaaatgaagtaaatatgcttctacaggactgtagttttgacaacagcatggaatccccttatatcgaagtagagtatcgatgtttcaagaaaaatcaaagaaatcaatggaatgatcataagacataaaccaagttttataaactttgaaaaaatcaatataaaattaatcccatatatcaagataaaaacagacatcctttcagcatgtactgtcaatcatgcagtagacataccatttgtcatatttgcatcttgagaacatatttttctttctgcaaatataaaatcccatttccaccataatctcgtacatactctcttcaaattaaaatgtatgctccgaggtagggacatggagaatcgattaaacattttctgccagagtgtttctagattggcaattgatctacaatgcgtatcgcatctgagaggcaatagtcattcatccctcggcacctggactttggattaacgggactagtgaagtttccatcatgaattttaagtagagcagaaaaaataatgaaacaatcttatttgaacaaatttgcacatctaataatatatacatttaaatttggattaacgggactagagaagtttccatcatgaattttaagtagagcagaagaaataaggaaacattcttatttgtaccaattggcacatctaataatttacacatttaaattatttgtgtgcattattggtgtttcatgcctatcacggtgcatgaaaacggggtaccctactaatttaccctcatcgcggtgtttctgcatttattttcctgctacttcttcagcaactagaaagatagcccgcgcacatgcgcgggcaccttatataatgtaagtgaaatttgtgggggtgaatttttattgaaatgtttagtgtatatatactaaacgaaaaataaacttatttagtatgctttgaatgctgattattttcttataattacccttgcaacatataaattctaaagtaaaattacttgacatcgtgcagttttgaatttataaaaaaatattgtgttgaaagaatggaggtggttcctatgagaaaatttatgatattttgacttcccagaaggatagcttataacccaaaaataaatccaatgagatcaatttttatttgattcaaatttaattatatttaaagttaaaagggtttctaggggtaccctccgatctacaaatgcaaccgattaaaacggaaaaaaaaggatggaatggaggagtatacctttatcttcgatttccaaaaaaaacttgtgaaaaagattgagtggatttgatgagtagagatgggggggagagaggggagaagggcttctctgcgtgctcgggctcctaagttggcgaaaatgagtgggggaggagaaaggaggtggggcccgcacgggttaagggcgcggcccacccagggggagtgcggcagccttgctagcaccgtggtgtgtgggacggaggcgccagcgtggcgcctccctttgccatgtcagcccactcacgtgtgccctagtgccacggtgacacggtgacagcgccagggtggctggcgctagggtggaggatggtgccagcctctctggcgcaaaaaaaataggcccattcctgtaataagtttttcgaggagtctatttgtaaaataagttttgaaaaggatgaaaaggtaagaaatttcagtttgtaggatgtttaagtgatagagggagaactgctagaccaagtagtaggtggaggtctatttgtgggcttttttttcatgtaaaaataattttgattatcattttatcatgaagatagataaaactgaaagaaacgggagggaagtatgcatgttcgttcctatgtgatggcgaggttctggatgtgtgtgttcttttaaaaaaacgatttaaccatccaaaacaatggattcactaatttaaatgaaaatcgttgttcagattttttttttatttattagagtgttccttggtgacctaggagcgtttgtttgtagggtgtcactttgtggcttaggaacaatttaaggatgtttaatggattagtttgttttccagaatctctaagattttataagcatttataaaatgtttaatggattttaatgccgcacggggtggaagggagggagagaggtttgcgatttttttattaaaaaatctaacaatctaaaacaatgtatccatcaatttaaatagaaatcgatagctggttgctttgttttttataaatattttttagtacgttttctaattttatagaccacgtagcgacttagaattattgcgttcatatgtagatcgagggagagagggagagcttctagacctagctagttggtagaagtctatttgtgggatttttttgcctgtaaaaatgtttttattttagtttctcgtgaagagagaaaataatatactaaggaacgggagggaagtacgtaccgtacatacgttcattaattcgtataacatgccaaaacttttaattttgtttttttacgtttgtgccgaatctgtttctttaataaaatatatctaatgttctaaaataatgggtccaacaaaatcgttggtaggatttctctgatttattatttattatagtgccgcttggcgactcgagagtgtttatagggtaccacttagtggcatgagaacattttaggaaatttaatagcgcattcgcgcgggtatgcatctaggatgtgtttgaaaaatttataagggtggaatatcaattgagcaacattcaccaagctttagcagtatgttttctccataaattttcttcatcaatattgtttagataatttttctaagctctacttaagatttatattatataatattcaattcatccatataaacaattgtctataatcttcctcatcataaaaaaaaggatgtatacattttttagggtaaaaaaagaggtatacttagtttgtttggagcatatgtctaataaattaagtgtaaattaaaataaggtgtttttaccttttctataaaaagactaaaaaacttttatgaataaataaatgtattttaatttaatcatagtgttttatttgtactatcaagctctgcccttaattgatttgcattgacgcaatttgttacacagaaattaataaaaaaaaggtgtacatatacatatcctaaacatttctccccttgtagttttttaaaagaaaaacctagttaatattagtcttaaaatttaaatttaattgtaagaaatatagtttcatataagtacgcatttgtttaaatttaaaatttcgtgcatatatgtacgtacttgtttccatatgaacagcatctttttaatattttttaaggtacgtacgagcgtttttttcaaataaacagttaaatgggttgtccctaccatagatacgtacgtaagttttttctggtacaaacggtttcacacatatgcacgggatattaggaggatgcaaatagatctaatctaatggcctaaaataacgggtccaccattttaaatgaaaatcgacggtgagattataaaatgccacatggcaacctatgagtgtttgtaggagcaccacatggcggcgtaggagcgtttataggaagtttaatggacttttagtatataatagatagatagatagaagatagatagataatagatagatagatagatgccatagatgagatccaatgacaaatattatgaattacctcaactggatctgctggaaacttatttggaacgcaggcaggattactagctttccagatggtccagcaaactgcagtcacttcagttgcaagcagacacttcttgatcttggtgaatttgttcatccaggaatcaagcagttgctgaagagtaaaatagctttgggtgtagatgcccatcctatgcgtggtatgcatatatataatcctgatgcctctcacacctaagtaatgctaccttacatgagcatatgtggctagcaggaccaaaaaaaaaaagcctcgagtttggatgaaaagacatatctcttctccttttgaagatgtttgcaaactacacggtgaagccaactctattaatcagctagctaccgtgtgttaccttgaaaagattcagaaggtttagctaactgcattgaatccgaccataagttgaagtcttaattaatatgtatagatccttttgtgaaatcaatgtttttgatttacatattttttttatgaacaattggcatatgattacatcaaaaaacaatggcatatgatttatattggttttgataataggtggataattggcgaagtggtttttactaggactggtcagatcgggctataggtaggccggccagatcggcgtgttgtgttctgtccaagcggccagtccgatggtctgactggctagactctatttggagttgatttcagaatgtttctttggatactcgtgattgcttcaatttatgacttctagttgatttctacgtgtgtgtaatactgttgtgtgctaattttgaatcaagttgggaagaacttttgctcgagatggttccttgtttgattcatgtttacttgtgtcttgatatctcgggatagcgttgcaggtgatggatcgagagttgacttgggagaaattgatgtccagacgatcgggagatcatgcgtgatgctttgactaaagaacaatgaacgtggttatgaagatttgatggcatataagagagattgtgtgcgtttgaaaagcggaatcaaatttggaaggagttcaaatttaggaagattgaactttgaattgtagtaggataagattgttacttttatgagtaggtttcctattggattagggcaaattattcaagtagaattcgtgtcttttgggttgccatctcagggtataaacagaagaggaggggttgagacctctcggtatcgattttgtaagagaagagttgagagaaaaattagggtttggcctacacttcaagtttagtcgaattttcagataggagtgttgttgttgcactgtaacgccccgacattcgttagccataaacacagctaacatacatcggggtgttatgctttacctgtgagatagtaccagtctcgggatatactagctagtacacatagaataaatgtgaaatcagagtaaactgctttattacatcactgggtagtagtactttcgaaagttgacatcatggacaggcccatagatgagcaacacaacaatacaaaaaaccataaaggcgatggcgcagaagcgaataacgtggagagactaagcggctaagcaactaagcactaggaaaagaacctaggcgagactatcttattccacaagggaggcttggggctaggcacgaaacatctagaagtcttcatactcggcttgctcctggagacactcctcagcggtgtggtcgacgtcttcatcttcatactctatagattaatataagggcaaggtgagtacttaacatactcagcaagctaggaaaaagagtgacatgctcggtttaaacaaggaggatagggttttatttgcgaaagctgcctttttggcaaagtgatttatttcacgaaaactcctactgagtcaagttttagttgtcgggaggaggctcacgcctcgacccatttgacaagttgctttgcaacaacttgtcacgagattaacaagcaataactattttgtttcctctattagtttcttttcactttcacaacaacacatggttcacatagttcacccagctatcctagcacatcaacaccttctcagctctaacaacacttcggtgtcagacgacaccccaggtcacatagacccgttgctaaccacaaaggttggccgtctgccacataggcggactctggaaacgtttcccttcccaaataaccactcttccacaaacctttgtcatacaaatctacgctatgagaaacaccttacactcgcccttgatgtaacgctccgcttttcgtgaggcgttaaaaactaattcggcaaaaatcctaattgcgaaaattttcattctttgtgtgcgagtctaagttgtgccaagatctcaattcaaatcccgttgttccctctcatcgaaatcaaaatccttcgcctcaaatttcctcttccgattcgagtctctgaaatcaaattctgaaattcaaatgcttccttgaatcctcgccaagtacttctacgaatccagaattattcaaatccccatctcgaatcatttccttgagtctcccttgattcatccctaaaccctcgagtttgaatatcaaatttgaagtcgaatccaaaccctaaatctctccatttctctccagatcaatctcctccgaaaaagtctattttgcctccctcggacttttgtgggccgttttctcttcggcccatctcctctcagccgctcctcctccaccccctcgcacgtgcgttgcgcgtgtgcggtcgctctctctctgtttctctcgctctctcgtctttttcctctctctctctcgtcgaactcctcacctcggcgccgattcccgccgccgccgtttgaattcgccggccgcccttcccgcgcgcgcctcgcctgcccgccgcccaaaacggaagggagaggcttccctttccaccgtcctccctcacctttcccttctaaacccggcctctctcctctcgcccttgtcttcttgcgcgcggaggcagaggacgccgacaacgtcctgccgcgcctgtgccccaccttgaccgcgccacgccgatgctcccgcgcgcggcgccgctcatggccgaccgctgtggccgcgccaccgtcgcccctgccgcgtcgaccgccttggtccgcgctcgccgccaaaccagccctcctcccttttcgctgtcatccgctgcgtcaccatggccccgcctccgcatgccacaagccgccaacgcggcgacgccaatcccacgcgcctctccagcctcgccgcccaaaaacggaaggagcaaggctcccttcctcctcctcctttcgcttttcccttgcgggcaaggccgcctcgctctctcccttgtcctggtgcgggagcggacacagggcgccgctgacgccacctttgcgccctgtcgcgcccacgccaccaccgcgaccatgccagctcgccgcttccaccttgaccgcgccagcctgcgctcccgtggttcggattcggccgtccgatccaccgccttcgccgcccaaagcatccacgtcgtcgccgctttcgcatcgcccacgaaaccgccgctgccgccagccgagcgcttgaccgccaaggtcggttctcccccccccccaaaccgacatcgcctcaccccgcgcctataaaaccccgaagccaagctccccatcccatctcaatccctcccacttcacactcctactccaccgcgccattgtcgcccttcctctgctctcgccgtcgccgtccgccgccgagcaccgggagaccggtgcgtgcgaggacgcgtgacgcgggactccgggcaccctccttcctccccttcctcggcccgaggccggagagctcgcttccgagccgtcggccgctcgtcactgcgcccgtctcggcttggtaatgccaccctccgttctcccttcttgctcgtcctctccctccctagctcgcgtggtagctcggctagccccccgatcacgcatggacactgccccaggtctcgccgccgaatcgccgctcgtcgcccttgcaccgcgcgctagctcgccggccaccatgctctgtcccggaggccgtctctcgtcgccagccaacctcggtgccgctccgtccaatccgacgccgggaacggattccttgaaccccggagatgctcccatccctttgaatcaaaccctcgtcgtctcgtcgtgttttcccctttttgctctccggtgattgccgccgccgcaatccgccatcgtcggcttctctcgcgtcgattcctctcgccgccacgcccccggggatccccttgacctccccctggctgccccaaggccgtcggccttctcctttgtctccgcgccgtcttgccgcttccgccgccgcataacaccgccgtgcgtgcgccgccggtgaccatcgggtcccgcgtcactgcgtgcgcgtcgcaacaccgtaccggttcggctaagcccgagcccgcgcacccttcgctctcctcgcgcgcggccacgtcggcatgccggcgagattggccgccgccgccggccgtcgtcgcgcgtcctcttcctgatgcgagccgtggaatgagttccccttctcctcctcctgccgccagtgctagccgccccttccggctcgccgccgttcgccggatcccgccgcacgccgtgagccgtcggatcagcctgcccggcctcctctgcctccccatccgacgtggctgccacgtcggcgccacctcgacgcgaccgggtcaaaagctgacctcggtcagccgcctccctccgtcccccaccctcgcgcgcggtccacggagagccgacacgctgcgcgtgggcccaccgcacaccgcgtccacccgcgcgccgcgcgtggaccgcctttccccccccgaaccctagcgccgcacccgcgtgcgctctccccaccgtgaacccaaccaccgccatgtgggtcccgcgcggtggaccgcgcccaccccgacgggcctccctctctccccgcgcgccctcatgggccttctcctcgcgcccgcgccggcccatttggttcggccgagccgcgttagcctttgggccgcaccaatgccaccgaacaagtctaatatacatccctctatccttttctttttccagggatttaataaatcctttttcctttgtcccataaatcaattccttattccaaaattccacaaatcatttcctttggtcccgcgcgtcagtgactgtcaataatattcttgagaatattatttctataaaatttcataaaccatttctcctattccagaaactccaattaaacttccaaaattcatatcttctcaaccgctcatccgattgactccgttccacttccagtaattccgtaaaattgagatctatttaatggcactactaattagtctaaataggatctttcttttggtcttttgtttaggttttcgattgtttgcgtatagttgcggttatcggattttcgtcgatcgcaggttttctcgaagattcgtgaagcttcgtgaagaccttgagcaaggcaagtcaccctttgatcaattgctcctataattgaaaaatcattattattttgtttgtaacttgcattattagaatcacacacttaacttgcttggcctcggtttgcgtgccaaaccgacggacctacccagtagtcgcactaatttccgtaggtcgtacatccctgattccttgtcgctccacccttgtggtacctcggtattcgtgctctctgagcgcgtataccaaatatcccacatacaccattgcttgtcgaaaacttgggaaatgggtttgtgaagcctccaaaacccgacctgtggtgtcggtgtgtttgaaaataaaatgaattgtgaaaaacccgacctgagcgccgtttccctacgacacgctcctgtcaggtgccgttgtacggcggtatcagattggggtgtgacacttgaccgtgccacggctgttcgaacaattcattaatctctgcagaggttacatgctttaccccatgaaactatcaccgtttaccgatacctatcggtaacggaagttcatggtaaggcctttccaaagctaacccatgaaaatcgcatgccacctagttgggctaagtctcttagccgagtatcaggcaaggtcagccatcatccactcaagaaataccgacgatgtctcctactgatatcgcgtgccacaatagaggcaataaaaagagacacccaatagggctaaataaacttcgtctcctcatcctcggcaccccacaaccattggcacaccaacccctatatgataactaattatttagccagaggtatcccataaacacccgtgtggtcgcactgtaatgtgtttggatggatttcccaaagcaaacgatgcttatcgacaatacatggccaaaccacaaagatatgaccttgcatcatcaccatttcacaacacattttatttcacaacacgtcggtacaacgcaccagatttttaagcatataattggaataacccaggtttcccacacgacaatacaacataagcatggctaagcgaactacctcgatagtcgtataacaataatgacgcaaatatttgtggagctatcaaaggtaaggaaacatcaacctatgtaatataagtgcgactactaggtcggtctgtcggttgcataaacaatctgaggcctaaacatgtttatcgtgtatactaagcaatgcatttttcaataaaaaatatcttgcaaatataggggcaatgtgatcaaagaggcttgccttgcacagggtgtgggtcttatccctcgaaagcggcgttcggagcttcctcatttagaagcaataaagttgatttaatttgaagagttctgcgctttatgattttgctcggttttgctcggggcaacctggtggttagaccagcggctctagggcggttagaccggcggcggctctaggagatggcggcttgaaggacgatcagaccagccgatctacatcggttagaatgatggttaaggtgctgtcagactggcgtgagctctgtggccagacccaacttcgtcaggaacattgtcaagttagatggtaattaattaacttttagttttgctaaaagttttcccttttttggtattcctacttttcacaaccctattgtaggtttggttctaggtattcgatcctacacctttcatcttctttcatctacaggatttcctggagtgtaatatggactggtcagagtcggacccaagagcattgggatgatgattatcatataattactaatggcagaggttattcatggttttactttgatcaaagggaaggttggcaacttggcatggtaatgctagttgaatttcatagcaacagcacttaacatcagtgttgttccaacgcaattaaagttcatcggaaaaagtacgaattacccccgaactatcgcggttagccgaattaccccccgaaccacgaaaccggacattttacaccttcaagtattcataccggataaatcacccccctgagcacttccaaagcggttttaatcctacgtggcatacacgtggcgccaacgtggaaatccaatcagccaaaaaaattaaaaaatatagggcccacatgtcatattgaatcacatcatcctctttctctggtggttgagcgagcggacagtgggcgtggctaggttgctccgaccgacggctagacagcggcgggacgtggagcgaggcggcggcagcaacggcagcgggatcctccttcccccgtcgcggccccatccgccgcccgagcaagccccgcctcccctgtcgcgctcgcctgggcagggcgaggctgctgcggcggcggcaacggcggcaaaggcggcgggctgtggtacaatgccacggtggccggggtcatcagctacagccggatcgcatcgctgtcgggcgtctccgtgcaggacctcttcctctggtttcccgtccgtggcatccatgtcgacgttccttcctccggccccatctacttcgatgtcggcgtcgtgttcaagcactgggctggcgcacggtgaagggggtggccgccgcagtgccggtgtgttcgacctccgcgccgccgcgacggtggggaaggaggtcgacgttgccgccttgctccatgtcctgccgctctcgccgccgcctccgctgccaccggagcagaccgagctcgtcgatccgccggctcacgaaataccaagatctggcaggcctctgctcgggctgttcctgttggtgggaagcatctggagcagcagcacaccaaatcccctcacagagtgtcgaaactagatttcggcaataataaaagggggtggctatcaagctggaaaagtgtatgggtttggagacaaaggatttatacaggttcaggccttcttattcaagaagtaataccctactcctgtccggggatgaatccgccgagtgtattattgattggatgattgggagaaaatcaacatccgcccctagaggcacccggaccccccttatatatgggaaggagtccgtgttacaaaagataatctatatccctaacagaataggcagatacagataaaatacagtcgtaaccgactaagtctcaaggtatttccttgatgtacaagttgagaaacaaactcgaaatacaaataagatattctatctatattcggtatcctatattcagcccaaacatcatcgccgtgtagatatgggatatccataatctccacagtagcccccgagacctttgcagtcaaccattatagccttctcaaagatagtaatccgagtgcttcaaattattcatgccaaggcctgccgagtagcgaagacgaagactgtaaagggcgaaacaataaagaatacggtgcatcgaatagatgcacctaattaggtgtagcccccaactatgtgattaattaacaaactaaacatatagttgagaacagaatattagcacaatcgcgcatcatatgacaaaagcatacgcggcgcctaaagaggcattctagccgactgccttttatccataataaaaagaatccgagtggttaacactctaaaaggttcacgaatgaacacacttgacaggcatccgaataaaaactctaaggattacccaccaagtattataaaaattatggtaatgaataagtctaatagcctaggctatgactatttaccataatgaaaacaggcatataacataccaagggaatgactataataaaaacaagtcattccaagttaacccaaacagcttttgtagcctaaaaaagcttacaaaaacagcataacgcttttctgtcgggcaccttttaatttgcattgcaataattccaaagaattatatgaccgcgtaaaaaggattttatcagcattgggcaacactattgtgcgcataaattgccaaagcaaaaaatgcctaagtccctaaggaacacaatgggccacgctgttaaaagtattgggctgaggtactgttcaggcctaagcccatttgcacctccgatacccttaacaagaaatcccgagatccaagcgacacttcgtcttccccgccggaactctcgccattttccccactccctgctacagtagagaactgcgccggcaaactagggttcaccattccgctcaaatccaccttcgaaaagtgcatcaaaatccttcccgtgatccaccgcctcaatccctcacctctccctagccatccctcgaatcaaatcagcgcattcgggtaaaatcgatggcggaggagaaagaaagctttgaaggccaatgggcgccgtccgacgtaacggaagagaacctgaaggagatggtggcgcacggcgttctccctgccaaggagatcatcgggtggcggccagcgtgcggtgagatttttccgacccccgatacacacgagattgtggtcttctctcatttcttctatggcggcttcgctcttccgacctcaaaatttttccgcgggatattaaacttctatggaatcagcttgcatcacctaaacccaaattccataatccatatcgccaatttcatccatgtttgtgaagccttcttgggaattaaaccccacttcgctctgttccgccgaatcttttttctcaagccccaaccaaacaaaaataaggcatgtgtagtcggaggggcaggatttcagttgaggggaactctgagccagaagtatttctctatgcccttcaagacctcaaacaaagggtggcatgtgaactggttttatgttcagaatcctgagcctgctcttcccgagtactcttgtcttcctccagtgtaccaagatacttggaactctcttccgatcggagatgaagctgctcaagccttggaattgatggaccgcatgctaaaactcaaagaacaaggcttgcaaggagagcagattactcggcatttcatcaaatgccgattggcaccaattaaagaaagatcccgtacagcattcgagttcgacggcaagcatgatcccaatcgtgaagaaccagactctctggactttaaaatcatgaaggagagaatgtataaaattttctcaaatgctattgtcgtcagctactcacatcagctgccagttgtgccatataatgcattcaatccgcctccgcaggtatgcctctgaaatcttcaatctatgaccaaaacattatcttgtcttcatgttgaattaattaaccgtggaggcatctcatttaggaatatgcgttgatgaaatctgatcccccaatcactcagcgccggtcgcctcgtcagcacaccgttcagggaggtggaggttcaaaaatcagaccagatccgcaacctcaaacctccaatccgactggacagacaggttctcggaagagaaaactggtgctcgacaacgatgaaggcgacgacgataaatctggggacaagggctcgcctaataaactcccaaagcgtaccatgcccaagaaaaaactggctggccgtcaaatgccaaagattagaacatcttccaggtacaaacctctcggtaccatctccctttgacatgcttctctcatagaaattacgctgaatatcgaaaggacactttgcaggaaaccatccgacatagatccaactggaaaagatcctgatccggctgtgacagagccaaatttatccaaagacgttgagcagactgccgaaaaccaaccgactgccgaaagccagccgactgccgaaagccagccgactgccgaaagccagccgactggcgcccatgcttcggatgacaaggccgatccgagtgaccagccaccgactggaaaccagtcggaagcaactgaaactgcaacaacccaagagcccccgactggaaaccagtcggatgtgggtcccgatcaagagatccccgaagttgaagcgcagacgacaacttctcaagggccagaggctggtaacgactcgataattgggtctccaaataaagaacaaggatcacctcacgcccagctaggaacatcttcaggtaaattatcttctcaagtgatgccgatttaaataacttcagtttatccgtctaacgtcttggaaacacatcaggaccaccaggcgatgacgaagaagaaatccttcgcataaaggcggccgacgactctcgtcctcctatcttaatcaaatggtgggacgagaactcacaagctgccggtatcgtcataaatcgtcaaaaagaagatgaggaagtatgccagctgaagaaggcgcttggagaagccactcgtattgtaaatgtaagtcttccgggcgactgcctttggtgactttgttttctttttagcagaactaaatcacaaaccattatgcagagaatccatcttcgcaatgaggccaagaccgcaactttagaaagactggttcctcatttgggaactcttgaagctgttagggaccagttacacgaggccaaggagctcgccaaaaagacggagaaggaattaagggagcgaattgctcagctccaggattcaaacttcgagctgagtggttcgtcaaaaggtaacctctagacctgtcgcattgatctatgctgtcgcaactgtatcctcaaccatttggatttcaaacagtgcaagccgccaagatggctcaaatggaaaagcaaattgaagccttgaaaagagacaaggtagaactggctgcacagagggactctgccttgaaggaagttgaaggtactgccagctgacaatctgaacttctctctttataacgcagcagattctcatcataaatgtgttttgtagatcgcaaaatcaaatcccaagctcaatttgacgtcctggttggtaagatcaagaggcttgaaggagcaagagatgaagttgctaatgtcgctaccccacttgtccaagctatgttcctgaataacagtggtccgagtgcactcgacgcaaccgaaatctttgacaagctgagagctgctccggatgtgtatttcaagaacatcaagaaagctggaagtatgggagctagcatggcattagcgatgaccaaatccttgtacccaagaattgaagttgacaccattgatggctttgcagacgggacaagtgaagaggctgctcttgatcttatcagcagtgctcaaaatgcggctgacaaaattgcaagcgacgttgtagatcaattccacaatactaactttcagccgagtagtaataactctgatgatgaaagaactgattctgactgagtatgaatgtaatacatggaggctcaatttgtacaatactggtgtatttatgctgtgcgtgataattctagcctagtctttgatttcttagaagtttttgttaagctttgttgagcctaaaacccaaagaagctattaaaacctttcagtcctcgcagactaagtaggaaaaccaaacaaggcaatgatagaccaagtaagcaaattgaattgataaaaaatcacactccattattatgataatagcccccgactgacaacgtcaagaagaaaacttgatgttgacagtcaagataggaaaatacaatgataagcttaagcgtagaaacgacgaagatgttcaatgttccaagagttgtcgacgagagtaccgtcttcgcgcttgagtcgataggaacctggccgggtgacttcagagatgataaatggcccttcccatagaggagataacttgtgccgatctcgtgtagtttgaattttccgcaaaaccaggtcgccgactaaaaaggcacgggatcgaacattgcgattatgataacgccgcaacccttgtaagtatctagctgactgaatcaaagccgcttcgcggacttcttccaatcggtgtaagtcatccattcggtcctcttcgtagcgttcttcacgaaaatttcgaaaacgcaaagactcgaattcaacttcactcggcaacattgcttctgccccatagacaaggaaaaaaggtgactggcctgtggcccgactgggtgtagtacgcaaagaccaaagtactgatggcagctgttgcacccatttgccggcatagggttttagccggtcaaaaacacgcgctttaatcccttgaagtatcatgccattggcgcgctccacctgtccattgctcatggggtgtgccactgaggcataacaaatcttaattccaaagtcctcacaaaagtctttaaaaactccgccagtgaattgtgtgccattatcagtgatgatccgattgggcactccaaatctatgcacaatgttgatgaagaagtctcgagcattatttgctgtgattgtgacaacaggtttagcttcaatccacttggaaaatttatcaatggccacaaagagatgcgtgtaaccgccggctgcctttttaaacgggccaaccatgtcgagcccccaaaccgcaaacggccaagacagcgggatggtctgcaactcttgagctggtagatgaatttgtctggcgaaaaattggcaaccttcacatgtgcgcacgattttgtcggcgtcggacactgcagtaggccagaaaaaaccctgccggtaagctttgccgacaatggtgcgtgcagcagcatggtttccgcatatcccagaatgtatgtctttcagcaattgtctcccttcctctaaagatacgcagcgctgcagaattcctgaagggcttctcttgtataactcagcttcatgcataacataaagtttgcttcgccttgaaatccgctcggcctcatctttgtcttaggggagttcttgagaagtcaaaaatcgtatgaggggctctcgccagtcggcttcaatcatagctacatcatgagtgcccgcaaattgagtagtatctttgtgaggtactgtcggcatataaaggtgttcgacgaaaacatcagagggagccacttcgcgcttggatccaaagttggcaagtctgtcggcggcttcattattgtgtcgaagaacgtgactgagctcgagtccatcgaacttgtcttccaatttgcgtacctcttgtcgatatgccatcatattgtcgtcgaggcaggaccactctttcataacctggttgacaaccagctgtgaatcgcctcggactattagacgctttatccctagggaaattgcaatccgcagtccatgaaggagggcctcatactcggcaacgttgtgggatgccgaaaaatgtatccaaagcacatagcttaatctttctccagttggggaaattaaaaccactcctgctccagtgcccgaaagtctttttgacccgtcaaaatgcatggtccagtgctccatcttctccgcgggggtatcctgctggcactcggtccattcggcgacaaaatcagctaacgcttgggacttgattgaaattcggggcttgaatgatatgtccaaagacatcaactccaaagcccacttagcaatccgtccgtttgcttcgcggttgtgcagtacatcaccgagtggaaatgatgtgaccaccgttaccgagtgaccttgaaagtagtgagatagcttcctggtagtaattagaataccatataacagcttctgaacctgagggtacctcgttttggagtcggctaggacctcgctgacaaaataaatcggtcgctggactttctggacatggccttcttcctcgcgctcaacgaccaagactgtgctcacaacctgggaggtggctgctacatatagcaacaacggctcctgcgggtgtggtgaggctaagaccggtggctcggtgaggagtttcttgaaatcttcgaaggccttctgtgcttcgggtccccactggaaatcatctgttttcttcagtagcttaaagaagggcatcccccgctcgccaagtcttgaaacaaatcggctgagcgccgccatgcacccagtcaacttctgaacatctttctgggtacttggcggtttcatgttgaggatagcagtaactttctccgggttggcttggatgcccctatgagacaccataaattcaagcagcttccctgacggtactccgaaggtgcacttatcagggtttaatttcatcctgaaagcgcggatgctcgcgaaagtttcttctagatccgagatcaaatcgtccttttgcttggtcttgacaactacatcatccacataagcttcaacgttgcggccgatctgtgttgagaagcacctctggatcatacgttgataagttgctcctgcattttttagtccgaacggcatggtgacatagcaataagctccaaagggcgtgatgaatgaagtcttcaagcagtcggattccttcagtcggatctgatgataccccgagtagcaatccaaaaaactgagaagctcacagccggcggtcgagtcgactacctggtcaatgcgaggcaacccaaaaggatctttagggcaggatttgttgaggtcagtataatcaacgcacatgcgccattgccctgttttcttccgaactagaaccgggtttgccagccagtcgggatgaaggacttctttgatgaagcctgctgctaacagcttggttaattcctccttgatcgcgtctttcctgtcttgtgcaaatcggcggagtcgttgtttgataggtttggcatcttctttgacatgtaaggagtgctcaatcacctctctaggaataccgggcatatcagatggtttccacgcaaagatatctttattgttctgaagaaaggtgatgagcgcgctttcctatttacaatctaactcggcgcctattacagcagttttagtaggatcagagggatctaggggaatcttcttagtcttggcttcgctttctccgctttttgaagtcttggtagcgggcacttctccttcgctcgccgtggctgcagccagtcggatatcctctcgggcagacgccatctcgcgggtttgggccatgtcgcaactctccttgtcacatgtgacggcttgcttgatgtcgctccgtagggataggactcctcggggaccaggcatcttcatcatcatgtaagtgtagtgcgggacggccatgaacttagctaacgccgggcgcccgagtatggcatggtatgctgtctcgaaatcagcgacttcaaagctgatattctctgtgcgaaagttttcccgagtgccaaaagtgaccgggagggtgatctggccgagtggagttgcggacaatcctggaattactccgtgaaaaggcgcattgcttggttttagctcggagcgagggatctgcatatcatccaaggtcttggcgaagaggatattgagtgcactgccaccgtcgatgagggttctgcgaagcttgacattacggaccactgggtctagtactagggggtaccgccccgggtggaccactcggtcaggatgatccgagcggtcaaacttgattgcgatctctgaccatcgaagatattggggcgtgtcgggctgaacagcattgatctcccgttcggtcaacttttgcttccttttagactcataagccagggggccgccgaaaatatggttgagctccttgcggtggacttgaaatcctgccggggcgtcgccgtcgtccttcttcctcgacgtgctttgttcttcgtcggagttcttccgtgtagtcttggtgtattgatccgcgaattgcttgtaaacgaaacaatctttggccacatggttggagttaggatggtgtgggcattgggagttcatgatcttgtcgaacgtgttgacgcgcgaacgctgtcgagaagagtgactggcggttgcaacaagttccgcaggcttacgcttgcggtccttatgattgttacttccacctcctcccgaagccggcgtatccttttttggcttccaattaggacccgactgctttgatgcggtgacggcgtcttcagctttggcgtactcgttggctttttcaaacatgagcttgactgtcctgggaggcttacgcccgaacttgccgaccaattcttcggggctaatccccttggtgaatgcggcgatgataacgtcgtcagtgatgtcggagatcttgttacgttgttcagaaaatcgccggatgtaatctcgaagggattctccggacttctgaataacgttgtagaggtcgtattgtgtgccgggacgctcgaaggtgccttggaagttggcgatgaagtggtcgcgtaattcagcccaagatccaattgtaccacggggcaatccatggagccaagatcgggcggaatccgctaaagccactggtaaatagttcgccatggccttgctatctcctcctgctgcgcggattgcgagaccgtagacggtaagccacgattctgggttagtggtaccgtcgtacttctctattccagtcggcttgaagccggctggccaatccactcgacgcaggtcgtcggtgaaggctgctactccgtcaaggtcgtcgtcgtggcagtccggcgaatgatgataacctcgagctgctcggcgctgtatgatggtgtcgcgaagatcgacggggcggcgacgaggtggtgagcgaggccgttccactcggcgctccctatgatgatcgggaggtgagtgaacagaccgctcgtcgtggcccctgctcctgcgattggatcctgcgccggtaatgctgaggcttggatgacggtagtcatgagatcggaagtgggggactcggctgccagtcggcgtgtggacgctttcggagttaactgggaccgaagccgcaatcatggtcttcgtctggttcaagatgttgacgacgtggtcagattgattgagctcgttctccctgaggagggtgtcgaggagggtgatcgcggcaaccgcattctgttgaggggtgcggaaaacaggtgtcccttcaacatcttgttggccaatgagatcacgcgctcggcgccctgcttccagagctcgctgccgtcgatcctcagcctccttcgcggtccgttcacgctcctgctgctcacgccgtagccgttcttgttcttgtgcttgatgctcctcctccagtcggcgacgctcagtctcgcgacgtgcttcggtttcccgggcttggcgttgctcttccgtctcgttaccggccatgaagacgccgaagtagagaggggtgtagttgtcatctaggcttccgtcgaagtcgtcgagatccaggtcgttgtagcgagagctaaattcgtcatactccacgatgtcggtggggcgcgagtcgacggtgggagagctgttgtagccatccagctgatcggtcgaaaccgtgccgagaggttggaggatgacgccgacttccctgaagctaggcgaaatcggtgttgaagccgacttccgcctaggcctacgggaaggagacgctgtcgtgatggagacggccgccaaatcgtcggggagcttcatcaggatcggtgggtaagccccatcatcttgatctggtgacgttggagaagatgcgatctcagccgagtggtttgaagccgactcgattgagatggtcttgaagcaactttcagccgcgtttgggaatccaaacgggactgagatccggttctctcccgactggttcgactccgagtcaaggagagagatcttgccgaagttgttggtgacgaagtcgaggctgccgaaccgaaacgtctgcccgggagggaagacgaggtcgtcgatgccggagacggaacccattgcactgatcggcgaaaagcttgacgcaacccctacctggcgcgccaactgtcgaaactagatttcggcaataataaaagggggtggctatcaagctggaaaagtgtatgggtttggagacaaaggatttatacaggttcaggccttcttattcaagaagtaataccctactcctgtccggggatgaatccgccgagtgtattattgattggatgattgggagaaaatcaacatccgcccctagaggcacccggaccccccttatatatgggaaggagtccgtgttacaaaagataatctatatccctaacggaataggcagatacagataaaatacagtcgtaaccgactaagtctcaaggtatttccttgatgtacaagttgagaaacaaactcgaaatacaaataagatattctatctatattcggtatcctatattcagcccaaacatcatcgccgtgtagatatgggatatccataatctccacacagagaatcaaaattcctcggagataagaacaccagtgatgattcctcctgctcaccgccggccatctacagcggcatcgaggaagaaaaggtcgtcagaaccagcgagaggacagcacacacgcggccacgggtcgcaggagcagcagatccaacaaccagcagatccagcacacacgcggcatggatggatggatggagcgatgaaattgtagcgaacacgcgttgttccacgtcccgccgccgttgcctcgctccaagtcccgccgccctcaccacccccgctgctgccactagagccggccgagctcgtcgacccgccaccgctgctcaccacccgcccccgcgcggcgcaccgctcgacctgcgcccaatggcctaagaaagaggggggagagagacaggtgatagagtttatatgataggtgggccccaccataaaaaaaatgctgactggattgccacgtaggacaaaaccgctctggattatgtcgagggggtaatttgtttgatattgaaggttcaaggtaaacgatgtctggttttcgggtttagggggtaattggccgaccgtgatagttcaggggagtaattcgtactttttccaagttcatctcagattacacatcccatgtttagatattctccaccagatgcttttaatttgactatgttttctcagtaatgctgctctgttggaatttgatagaagaattaagtgattaagacggaatacttgtttaagggtgtggtactataatagctgcaacggaaattttgaagtactgataccatattgtggaaatataacatgttatatgaggtgttttgtagaatcaatcaagactcttcatagtttctaattcaatggctcatatatatttgtactgctacctcaactaccagtggcaaaatatttttttactagtagatttcataaataatggttgaaattactttgattggcgatgctcgatcagcaatgctatgtcaggattaacttttttcctagctgattaacaaatatccaagaatacaaatgctcatgccagggttaaccagccatctcatataattgacaatttactggaggcaacaaaaacactgttgctttataaagcacacattgtccatcttagactcacagggtgtttgccatatgaatgcatgcatgggtttctatagcagttttcttttttctgcaaccatatggtatgatgtgattgaatataaattccttctccaagtgcaagtgttgtagatggtagtatactctagacatggagggcatctggaattttagatgcccaacactcagtgtcaatgtgtcatctgttctgtgaaactcagagagatcaccagattttgatactgagcgtgttgggctttagggaagttgcacagaaaagaatctagaagattttttcctcatgtgacatgtaggacgtgttcggaacgccaccgacatgacgagacacatagaccgcagattccaacaatgacgacacaagagctcaacaactgaattgccaaaggtgtgatagtgaactaattcattgaaaccttgattacccgaagcaagaggtgaagaggctctgtttggttgctgccgtgcttcaaatctagcatgatcagttattaggccgatggcacccgcaatgggttcagagaatgcagagagaaatcagttattgtgcgtgggttttcttcaggagtatcccttagcgatgttaagtagcaatatttcaaaaattccatcaaaattaatggatgtattacatataaaataagttaaatattaaattcgtcctacatatcgagatgaaaaaaagataagtgttcagcatgattcatcatgccgtgccagtaccatttgtctttttttttatctaaatttccatgacaatttaagattgcatcgttttcttgtttacatatatatgatttatgttatatttttcaaaatggcacattaccatattgaagtggacagactcgctaacaggactacaacttctatgctagagatatggtacgccccttcttcactgaaaatgaaacattttttatgattacccattaaaaacagaattcaatgaactacataattttaaaagaaaaggaattgggtgctctctgagttttgatagttacatggagatcctggttgaacatatcattttccaatgtcatgtggctatatttgtgtggtgtatttgtacagatgctctagaacagcctccttccgagctcctagtagtaggaatagttggcagcttgagatggcatctctttatcggaaaaatatgtagtgcaaaccctatatgtagtgaaaacttggaaattaccattggatcaaaaaatggaaatggatgttcgagattcgtccacgtcaccatggtaaaattttaactcatgagtaaatctgcgagtaaagtttttactcgtgatgacgtggacaaatctcagagtctatttttttatccaacaatagtttccaggtttccactacatgtatacatacgtagtttccaccgtatattttcccctctttatctttttatcccacaaaatagcatgaccttttttttaaacattacttacgtttgggcaatctcacaacaaactttcaacttaaaagacaatgcagagccaaaacaaagaaaaaaatcattctgggctgaagtgaggatgaggttttagctaggatatgtaaagttagggtatgtgcgtggcaatgtcctagttttgtgacgccgcttactttaacaccacaaaagatatcaagaagtatcacatattgttactagaatttatgaatttatagtaccttgcggttatcctcttgtacgactatgaaaacccaattataaatgtggacggattttatagtacaatgtcatatgcaaagctgaagatactcacatttccttgatcaccagcataaatatatgagcacacatgcctttcaccaacccacttgatgagacctacagtgtaagatggaagtgatatatagacttgcattctacacttgcgtagtgcaacactggcagtgaccaacctctcgcttcaaaagcacattttctaactagatttttatcatcttccataagccacaaaacaatgggaaagtagctatttaggcatggaaggcatcatgaatgttagctcgacgtgctggcggtcagaagctgtgaggactgtgtcgtgaacgaaaggctatttgtgcatattagtcttcaataccacactgagaacatttatggctcctttcactaggccagtcttcgtccacctattcagaatagtcccatcctcttctctgctgccatgggtgagttagtccagttccactgtcaagtgtttcaagttccaactcagattatttccagtttcacagttatagtgtcttcaattccctgtctaacttaactgttatagtgttaaattagtatctcccaccaaaagaatgctacttgaattaatcttcactaatcagattattggtgttgattgattaataccctgctttccacacctcttaccatagaacatatgtataaaatcaatctatagacaactaatgagaacataaatctgggcaagcttgttctggaccaaacccaaaagctgataatagtaaaatttgtaaaacattatatagtttgtttggtgaatgctacaagcaagcttttattcgttgtatttgatcttatccgcttctccgattgttatctttagggtgatttcgatgctaatgcagatggaggcaatgaaacaaaatgagatggtttatatagtttgctctgttggtggctttaggcctttttggaacctgtaacctaaggtttcgttttggctccttcaattgatatggtggttaagaaatctttgagctccgagtagtaagaagtactactagctagctagttggctgcttgagatggcgggtgtttccctttttgtgtgaacctgatatgtaagctggcaccccacaaaattttaggaccatttttttggcatcggttatatgatcatatagctaactttgaactaaattaaaaaacaatacatatgagcagagccattatcgtagtacaatgccatgtgaaaattttaagatatcgctcacttttccttgattaattaccggcataaatatatcagcataagcctttcaataacccaattgatgaggcctatagtgcaaaccagacgtgatctgtagacttgaattgcattctacacttgcacagtgcaatggccgacccctctctgcagaaggatatattctagctagactttcattctcttccaccagccacgaaaaaaggaaaatggcatttcggaaaggtatttttcaggcgtgacatttagttttacaattgattaaggaatctttttttttacacaaatgtgcttcttccatgatttaatctttaaagatcatttatgtgtcatgtttttagggttaaagcatggattatcacattttagattcaatagtattgttaataggattaaaacttagctatgaaaggctatttttagcattggccatttattaaccaatttggcttattttgcatattgtgtataaaatatacttgttaacatttgtatttctattccaacagatagagctggaatttacaaaattttagaaataagtttcacataatttgaagttgatttgaactagttataaattttccgtaggatacaatcgtcgtcaacctgatctgaactgtccggtgaagaggtgaagacgagacagtataacatttaaacagaaaatatctttagtttggcggcctagtccaaactccttaggaggaatttgaaataaattaagctggaaacaaagtcagcatatacaaaacgaaaaaggaattagcgtataattaattgagctattattattataaaaccaaaaatatatttatttgatattttaaatcatcttctatatgcaaagtttttacatgaaatatgccatttaacagtttgtaatatgtgaagaatggattaatacatggatatatcatataatttagagaagttaaatttgtattgtagtgatttatcatgtatcaatatatcttgtttattttttttaaatttatttattgttatttatttactttctccgtttcacaatgtaagtcattgtagcatttcacacatttatattgatatacattgaaatgctagaatgacttgcattgtgaaacggagagaatatttttaggagagtttataattcactcccatagatccatgcatgatgcatggtggggtgcaaaactgcgggtggcgaaattgtgttgcgacttcacgttccccagccgacgaatgaaatcatggagaaatcgagggaacccaactggacaaacccacctcatatggcggcaacacatggcggcgcccagagcgaaactcgctgaacgcctcgccgagcgcgcagaccacaatggcgcgccgacgccggtccagcaaagcaagcagaccgtccacccgagccggagcaccacgccgctgctcgcatcgccggaccacaggaacgcgccatctccaactctgacaccggcggcgtgcagggactccggggtactcccgtcaagtcgatgaccttggtgcacgccattcggcgcaaggccgtcctgtggaggaggttcatcgtccagatgtccacctgggtgctctggccgacgagcagcgccaacaaccatcgtgatggggggccttacccgatagtgatgatgctttcagcccgtcacagataaacaatcccgttctagtgcgacctcccgtcaccgccgcacatgctacattataggtctgaaattatgtaatagttgtcatttcgatactcttcatatgcaaatgaacttctgaaattaatagttacaaaaaagtctctatgaaactagtactagtatattaatatctctatagaaaaactgatgcaaattgattggatattgagacagttactttcagggatagctattttattgttgtcttataccgttaaaaaaagtaagtaggattattgtaaaatattttgatgttttctattttactccgtaggaattatgcatggaggctcaagacggtagtggaatatcttcggcaactcaacagaagcatcgtgtgttgcagggacagaattccccaccagcaaagcaactaaagtccccaattattcctattgtcggttcccctgggatacggatgttgatgggaaaatgcttcgtgtcgcgcgtccgacgggaagacaaacatcggacgccagcttcctctatactagtctaaagttgattcacctttcctggtgtttttcctgatttctctttcccagttacttttcctcagccgtatgcatgcacaacttgcatgcaagtatataggaacatgcaaattgagacatgatctttaaaaccatttttcttccaaactaattatgcgattcatgatccgattactgtggtgtatttgttgttattaaatctttacaatgagatcttgcatgattatattatgacgaaaaaaatatatatgtttcaatcgttaaaattcagtgtttgactcaatgagaaacaaatgtttcaattagaattggactatgttgcactttaaagttttttttttgttgcaatgggtttttgaaatgtcacatatggtactacctgttgttgcaataagcatttcacgatgtttcagtagtttttttatatcgaaatatagccatctgagatcttgttataaagattttattataacaaatccaatgatgtaatcaaatcacagatcaaatatatattttaagagaaaagagttcaaagaataaaaatatatgtgtacattataatacagtactagtagccgtacatgctgcatacataggctagcacatgtggctgcatgctcttgcgctttaaatatagtgctaggtgcgctgctactaagggctatgagaggcgtccgatatttcgttttttatcagacgtccgatggcctggtagcctcctccatgttgatgtcatccaatcagtagctagcacgagtaacaagatccacatcgacaacattgccaaagtctccatctgagcaaacaacatttctcagggatatggtaagtgcaaatacatttggggaaatttaactatttgccactcttgtgacatagcaattaacgatttgccacgctctgtcaatgacacgtgggccctcatgtgtctatgacatgtgggcctagtggcaaatcgttaaggtccattcgtaagagtggcaaatagttaaaagccccatacatcagtgtcaatttgattttgtcctatgacatgaccctaatcttttcctaggaaattccatgtcaatttcattttatggcaatatataggtccatctcgtagatctataaagagaaaacttacttcggagatttggaaagactttgaacccatatatgatggcatattggtgcttgcagctaagtgtattcaatgcaacaaattatttaaagctgatagggatgttgatgttgagattatagacatataatgatttaatctatcccataaataaatcatgacattacagatgaaaactagcatgaacgcatcattagatctatacatgtaaactacacagtataacatgaacagatcaaatatgcgcaacatattgaacacgtaccgaggtgacggaaagatcggctgcttggtcgaaacttttcgcaggtgtctacgaaggcacgaaacacgcgagcgaagaggaaggcgagccgtcgcgaacaaacagggagcagtcgcgcgaagcgcttcccaaaaaccttattgccgccttctcccggtgcaggacgtcgaaggcagaggttccggagacctgctctcccgatcgacggtgcacgccggcgagcgggatggagtagtctacgagcgacggcgcagtacagagtaggaggcaaaccctagattgatttcgcttgtgttgcgtgaagacggcaggtcggtttatatagagaagagtcgcttgatcggggcgcccgcacgatctctactgcgcgtaaccgaaccggataagtcgcgcgtaacttatccggactccacgccgtttgcacgcaccggatttttcggaacgtttccaaaacaaaaacgaatctgaatttgcagcaaaacaaaactgcaaaaggaagctgcatctacgcaagggtgaggagccaatttttcggaccattcgacgcgtacgtcgtgcacgcgcgccgcctgcccggcccggcccggcccggcccggcgaggcgaggcgaggcgagcgagcgcgcgcgtgtgtttcccctcttctctccaccacacatgcttcaagtgactaggaggacatcctcccttttaaggaggtccccctctcctagaataagcaaggtggtactaaactccacatgcatgccatcccatgaggtgggcttttgtgattttccaaagaattaatcttcgagtgggctaaggcccattcattaattccaacaatccctcaccaaatctcaaaatcccactaagatttgccttttccaatatactgtttatataccagcggttcgatggagaccaattaaggttgaacatccacctagaactccaagctacacttactcacaacttgaacaatggactacgccttgaattgcaagtcttgtgcaagcaagtttcactcaaagtcttatctggtactagaccgtctgtagactacccctcgggtggagcgtataagtcatactcctaggtctttagtaagcttcctagaagattcacccaaaatcttcatagactgcgaccaacagtcaagctcacaaaggtgagttctttcaagaatgctctgcaggacaacatcttcgctaattaaagccaacaaaactcattaaggcatagccaacctgccttgcagctcacgagagtatatgcatcttcacttggagagggtatatatattggtactctcctctagtttattaatggtttgttcttcccaggatctaattcacgggatctccgatcacatagactgggttaccaccatagtataactcacatgggtctcaaacccatctccttcgatgcattgtctatcacatttcgtgatagtcccttcgtgaagggatctgccaggtttctcgctgtttggatgtaatccaacgttataactccggagtttcttaatttcctgacagacttcaatcgtcttttcacatgtctagacgatttcatattatccttagaactattcactttgacaattaccgtttgattgtcacagttcataaggatagtcggcaccggtttttcaacaacaggcagatccattaatagatcacgcagccattctgcctcaacagtagcagtatccagtgccgttagctctgcttccatggttgacctcgtcaaaatggtctgtttgcaagacctccatgaaacagcaccaccacccagtgtgaaaacatatccactagtggctttgatctcatccacatcagagatccagttagaatcactataaccctccagtaccgcaggatacccagtatagtgaagccccaattccatagtacctttcagatagcgcattactcgctcaaacgcacgccagtgatcatctcccggattagaggtaaatcggctcaacttgctcacagcaaaggaaatatcaggcctagttgcactagccaggtacatcaacgagccaatgatttgggagtattccagttgattcctagcaattctcttgttcttgcgaagcaacaagctaggatcataaggtgttggagaaggcttactatcaatgtagccaaacgattcaagatcttctccacataatgggactgcaagagtgtaatcccattctcacctctaattagcttaatgtttaagataacatcagctactcccaaatccttcatatcaaaattttgagacaagaatgatttaacctcatttatcacctcaagatttgtcccaaatatcagtatgtcgtcaacatacaagcacaaaataactccctcacccccaccatggcgatagtacacacatttatctgcctcattgactgcaaagcctgcagatgtcaatgttttgtcaaatttctcatgccattgcttaggagcttgtttcagaccatacaaagacttcaacaatttgcacactttgccttcttgaccttcaactacaaacccatcaggttgatacatatagatctcctcatccagctctccattaagaaaagctgtcttaacgtccatttgatgaacgagaagaccatgtgaggctgctagggaaagtagcacacgaattgtggtcaatctagcaacaggtgagtaagtgtcaaataaatcttcgccttctttctgagtatagcccttagcaacaagccgagccttgtacttttcaatagtaccgtcaggcctaagcttcttcttgaacacccacttgcaccccacaggtttacacccatagggtcgctctgtcacctcccaagtcccgttagcgataatggaatccatttcactatggacaacctccttccagtagtctgcatcaggagatgcatatgcttctgaaattgacttaggagtgtcatccacgaggtacacagtgaaatcatcaccaaaagacttagccgtcctttgtctcttactccttcgaggagcttcactgacatcctcctcagagacaagttcatgtgtatgttcagtttgttctggtggtgtgattgaactgggaattatttcaaagggttggttcgaaccactatgtgtatccttcattgggaaaaagctctcaaagaaggtagcatcacgagactccataattgtaccaacatgcatgtccggtacctcggatttaactattaaaaatctataggcaatgctatgatgagcatatcccagaaaaacacagtccacagtcttaggtccaagtttgcgcttcttcgttattggtacattgactttcgccaagcacccccatgtgcgcaaataagaaagtgatggttttctaccaatccatatctcatatggtgttttgtccttatttctgttaggaactctgtttaacacatgatttgaggtcaacaatgcctccccccaccatgccttaggcagtcccgcggtgtccaacatggcattcaccaagtcagtcagtgtgcggttcttcctttcagcaatcccattagactcgggagaatagggaggcgtcctctcatgtatgatgccatgttcctcacagaataagtcaaactcgttcgagaaaaactctccaccacgatcagacctaagcctttttatctttctgtcaagttgattttcaacttctgccttataaattttaaaatagtctagagcctcgtctttcgttttcaacaagtacacatagcaaaatctagtagcatcatcaatcaatgtcatgaaatatcgttttccacccttcgtcaacaccccattcatttcacaaagatctgaatgtaggagttctagtggtgccaagtttctctcctcggcagccttgtgaggcttgcgaggttgcttcgattgcacacaactatggcacttagaacctttgacaatggaaaaattaggaattaaacacatgctggaaagccgagacatcaagccaaaattaatatgacataaacgtgaatgccaaacattagcctcatcatccacactgccacaaatatggttcacagacttattgcagaaatcagaaagggaaaagcggaacaggcctccgcactcataacctttaccaataaaatatccatgtttagacacgactactttattagactcaaaaaccaacttaaatccgtctctagtcagacgggagccactaacaagattcctgtcgatagaagggacatgctgcacgttcttcagctgcacgatctttcccgaagtaaacttcagatctaccgtgccaacaccatgaacagaagcatgtgacccattccccattaggacggtggaaccccgtgcgacctgataagaagaaaacaatgagatgtcagcacaaacatatacattggccccagtatcaacccaccaattagtagattgattaactgaaaaaacagtaggtaaattaccatacccgcttccatctccagtgttgccaatggtcactttagcagacttagaagtctgccctgcaggtgccttcatccccttgcgctgtggacactttctagccagatgaccaacttggccacacacaaagcaagtcctctcatcctgattaggattgttgttgttcttcttctgcttcttgaagttggtggtctgctgagctttgtatttccccttgctcttgttctgggccttgtgcacaacattggcactggactgcccaccatcgcccttagacgcggcatctttttcccgagctttctcctcaacatcaagagacgcaatcaacccctcaacggagtattcctgtctcttgtgtttgagtgcagtaccgaaacttctccaagatggaggtagttttgcaataatgcacccggccacaaatttgtcgggtaagacacacttaaggagttcgagttccttagccatcgtttgtatctcatgagcctgttcgactacagaacggttgtcagccatcttgtagtcatgaaactgctccatgatatacagatcattgctagcatcagtagcaccgaatttagtattcagtgcatcccacaactccttagcgtcggtcatatgcatatacacctcgaccagacgatcgccaagaacgctaagaatgcatcccacaaagagagtagtggcttcctcgaattgcttctgctgttcagcagtaagaactccttcaggtttgccagtactcacccagaagcatttcatagctgtcagccacagagtgaccctgatctgccatctcttaaaatgcacaccggtgaatttatccggcctcagtgcatcggcaaaaccagccatagtaaaatcacagtgcctataataaggtttttggaatgttgagattatagacatataatgatttaatctatcccataaataaatcatgacattacagatgaaaactagcatgaacgcatcattagatctatacatgtaaactacacagtataacatgaacagatcaaatatgcgtaacatattgaacacgtaccgaggtgacggaaagatcggctgcttggtcgaaacttttcgcaggtgtctacgaaggcacgaaacacgcgagcgaagaggaaggcgagccgtcgcgaacaaacagggagcagtcgcgcgaagcgcttcccaaaaaccttattgcctccttctcccggtgcaggaagtcgaaggcagaggttccggagacctgctctcccgatcgacggtgcacgccggcgagcgggatggagtagtctacgagcgacggcgcagtacagagtaggaggcaaaccctagattgatttcgcttgtgttgcgtgaagacggcaggtcggtttatatagagaagggtcgcttgatcagggcgcccgcacgatctctactgcgcgtaaccgaaccggataagtcgcgcgtaccttatccggactccacgccgtttgcacacaccggatttttcggaacgtttccaaaacaaaaacgaatccgaatttgcagcaaaacaaaactgcaaaaggaagctgcatctgcgcaagggtgaggagccaatttttcggaccattcgacgcgtacgtcgtgcacgcgcgccgcctccccggcgaggcgaggcgagcgagcgcgtgtgtttcccctcttctctccaccacacatgcttcaagtgactaggaggacatcctcccttttaaggaggtccccctctcctagaataagcaaggtggtactaaactccacatgcatgccatcccatgaggtgggcttttgtgattttccaaagaattaatcttcgagtgggctaaggcccattcattaattccaacagttgataggagcaattgccacagacatttggatagttgtgatggtaaagctagattgggtcaaatggtggaagtactcgatcaggtcatctactcattcacatgctgctgctcttaaggattggcaatttgatcaagaattatgtagaaaagaacttgttaaattgattgttgtgcatgagctgtcctataactttgtggaataccctaggttttaagagctttgttgctagcttgaattcgtgctttaacttatttctaaaactaccatcaagggggactgcattagtgcatatgagcagcgaaagctaggagaatattgcccccgggtatctaacagttgtgcacaccaaaataagagagttgtttgctgaatatagttcacatatatatgaacaaaagtgctcataatgatcaaacaagtgagaatgtggagtttcaagttgacgatgataacatcgacgacaacccatgggctgactggggacagcatgttgctttgaagctaagaagcaaagctagtcatcttgatatgtacttggaggaagaatgtccctgctactactgattttgatatcttgcaatactggaggacattctaatatcacaacaagaatcctgttaatccgtgatggaaaatttctgtcacggatcgctgaaaaaccatcaccaaacaacatctgtgatggtttcagaaatcatcatggattgagcgtcatggattgacctgcgtgacggttcgtcgaaaaccatcacagattaacagaatcgatgacggttttaaaccgtcacgatggagcccgagatctagttagtctagccaagcccatttcctatgacgaaaaataaccttcatgaatagctgccacgtagacatttttccatcacagattagctgccacataggactttttttccgtcacggattcaaatcgccacatatgtgccatgggtacgccaaggtggatgttgatgtgtcatcaatgccacgtaggatttagcccacgagttttgtggcccaattcgggtttccaggagctttcggcccatttatgcccatttatgaccagctagattttttttgttttgggccgatttgtttttttgtggggtattttttcggccttttagtcatcattcaacccagttcaaattgggctactactagatttagcccaagtaaaattcagctgctgctaaatttagcaaaatacaaatatttcgtccataattttagcaaaattaattacagatcattaatttacattctctcatcatcagcaacaaaatagttacagatcagtaaaaacacattccaaccttcacatctcatacaacattttttttgagcatatctcatacaacataattaaaacctgttcaaaagcacgtgacaatgctggagcagccaccaaagcattttggccactcctccatcgaagttcgcatatgtttgagcccagcaacctgatagtacagtaccatatgttagattatttttttatgcgctagagaaacaacaagaaacaatccacatatacgatattagtttttgaatgataggtctactttgtagaccaatctgatgtccccataatatattgcactaacaaaacccaatgttcccatccccaacccacctcatttcattggccaagcaaacaagcaactgacgctagactaatagtatttgattaaacaattatccaaaaatatgagagcaagtaaagtggtacaagaaagtgaactagaatgtataggagtatagcactaaaatttagacactaaagtatacgagtaacttcctatgcatgcttcatttctacggactataggcatatagcatttaaacatacagatttgtatgcaggaccgtaaagtgtggtgtaaagttatggacgccatttaaacatgcttcatttctacaaagtacaggcatacagcagcagttccacgacaacatggagtgcaaatgccaggcaggaaccaaaaatgcatcaaaagaacattttcaaacttccaaactttatatcaccagtggcacaatgtggcagcaacatcactaagtagatgagcttgacactatggttcaagtgaccattcttaccatttgctaacaggaaatcagagcaaaaaattgccacccaaaaatttgtccatctttcaagcacactaggtataaggagcgctttatgcgccctaccatcaggcaaacaatataaaaaagagataataagatgcgctttgcgtgccttaccatcagaaaaacaatttaaaaaagaagagaagtcatgatgacaggaaacccacgggctacaacctagtaattgtaataaattaaaatgtcaatgccatgcatgcatgcagcatgtcaacctagacatttcacgcgcgttgctcaggatacacaaagaaaatctcacctagtcacatgccaactatcgtaaatcaacagaccatgcatgtgtagttgaaaacttttaagatagtttcagactgtgctaataggaaaattagcaaaacaccataaaggcaaggcaaccaactcacaagcatagcgcgtgacttgttagcagcccctgcttctactgtagcttgagaaagtgcattctccactgctgagagggtcataagtgattatagaagcaggttgaccagtgagacaatagaggctttaatctgcttgcaagactggattagggcagaaggctttaagctggagtggacggcggccgctccgcagatttccgatcgatgagtggacacaagtcgcgtggtcctcgcattatgcttagtttcaacctcctggcccggctttagatggactcgatgctagcccactctccttggtcgaatttctgcaagtttcttgttcaacattaatttttgtttgaaatttcgtaatttaactaaaccctgaaaattttccactttccgatgcattgaaccctggccggaacctatcaaaagtatgtcgtcagttgattgcaaaacctcatagatatcgattttcttgcatgacatagcatcagggcaattttgcgcaaagattatagaatctcaccaaagactctttcatatatatttgaacacttttctttggacgatgcaagcgtgtgatggtccagacatacttattagcctactccagtttaacaatttgaactaacattacttgcaggaatcttcataggtgtcggtttggaactagtcatgccttcataggtgctagtttcccaaccaaaacaaatttggggtagctatgccctccgcatatgttccgattcaaacaccggcacctatgaagatgacaggtggcggttcttaccctataaccggcacttataaccagttccatcaataaaaaaagctccatgcattcgagccgatgcgtcgagcatctcctgatccacacccaataaccacccctatgatccccatcatcccccatccaagaacacattcatggaatcgatcaaaattgcaacagaaaatgaaaataaacagggcaaggaatgtagtgtggggcaagttggtagtgatggtagaggagcgggtcgaggcaatggaggtggatgttggatatatatactacgagcttgtggctatggaagatgaagcagtggcacagatcgacgagggcggcgctaccaccagtgctcctcaaccttgccaccatcactcctcctctgccgccaccaccagcatcctcattgcatgcggtcactacttgtcgtcgagctcggcgccaaagtcagtgagcctggcctgtggcagctgcaccggcacagccacggtgaccacgtcctctccctccacctccacctatggactagtggtttgggggcggtgggagtttggaaggttctttagagggggtgggggtgcggagaggatatggatggtgggaagtggataagctcaacttggccgcacactataaggatgtggtttggataactggataaggatatcatgtgggtgccggtgtctcggctcggttggctttgggtttcggttttttcaaaaatggatacatatactaacacctatagttgttggttttttaattaaccggcacctatagtaagatattattgtcgattcttttaaaacaatactaacacctatagtataggtgctggtctttcctatacctgcacctatagtgctcaaagccgatggttctataatttttcaaaatgtggaggtgagaaaatgcttatcggtatcgagtcctctataagaggtttcgtagtagtgtaaatactccctccgtttcaggttataagatattttaactttagtcaaagtcaaactgctttaagtttgactaagtttatagacaaatatagtactccctctattccaaattgatttacgtatagttttttttttgaggttattcctaaatgatctacatatttgtgttcattcattaattttattcgttatttgtgcattggagtaaatggacattgatgcatgcatccatgcacacaagtatttataacccacatgcaatatcttgatttgctattggctaggaaatagtggagatggtacatgcattgagtttgttgctagagtaaatatagtgtgagagagctattagcttttcttggtcttggtgtacctatgaaatatgtagatcaatttggaatggcgggagtaatatttacattaccaaattagtttcattaaattaataattagagagaatcccttatatgccactccaaattaactgattcccttatatgccacttcaaattagcccttcccttctatcacaccggttcaagtttgtcctcccttctatgtcattgccgtcaatcctccgccagttgacccttaacttcatagcaaaaagatgcatttgcccttgagatttggtatacaaccaatgagttttttttatttgatagagaagttagtctatgtatatatatagcattttagtactaatatagctaatgcatacgacatatgaaaattgatttttttttgcatcacgtgcaattttagccatcaccatcacaaatgaattttcaatataagcacgaaacatgcagctttccaacaatatttttaatacaaagagcatttttcattggttccgacaaaattatgttcattcaaaaaggatttaaaataagctagttatgatttttttaagtttacacattttttagttgagagggcataatggtcatttagaaaaaaaaactaacattggactaacagttaacaaacgttatagtgctgggagtggtataaaaaggtggaaaaacttaaaccagtgacataaaagagagaagctaattttaagtggcatataagggaactagtcaaatttgattggcgtataagggattctctcaattttttttcctcaagattagtgtgacttgcttagctctatcagagtatcactacggaataattatggtagttccagaatcacgagctctggggagtctgcatgaaaactacgtagaggtattaatagtcaccgggatgagtttaaggtgttcgaggccacaatgaacaacggcgatcggcatgagaaaaaggcagaattattttctcaaacataaaattagatttcgtttcaaattacaagccgtgcgaattatgtagcaaagactggggacactctatttattccttaagaatatcctctcacttttacatgtcgcttgaaaatcatccaagaaaatttggaaaaaaaagtaccatattattacgtgatatgtcactccataaacatacatgtttaaattcaacttatataagtgaaaaaataactaatttgattatgaatcaaagacgtaattcacggttaaatttattttgttataaaattgtataagtcgaattttaacttacatgtttgtggaaagatatattatatactccctccataaaaaaacgaatctaagactagatgtgatatattctagtataacgaatctgaacagaggcatatctagattcgttatatcaggagatatcatattcagtattagattggtttttatgggacggagggagtagatgacattttaaatgccttacacaaaataaaggatgtcctggcacacacaaaaatccgaaaatgctcacacccgggcgaccggcaggggtggagaaaaatcgagcgctgcttttgtgcctgccagtgtacgtctgcatgcaaagaattttttctcacatgcaaccatctcttatttcttcaaaagatttttttctcataaactatttatctaatctacgatctgattgcatcactaaattcattacaattaaatctttacaacaagaccacacatgattatatttcgacaaaaatattctagattttttattattttttttaatattgcatatggtctcttttgatgtttcaaccagtagttttacaatgtttcaactagtatacttatgatgtttcactatgtacggatcaaatgttgcagtggattttgatattatggaacgcgccgttgcaacaaatcacccatatattttagaaaccctctattaagggaatttggtttattttttgttccaccaaaaatgtttcacctagtatactcacaatatttcactatatatagatttaatgttgcagtgaactgaaatatttcattgcaacaaaaaacccacatattttggaaacctcctattaagggaattcgtttcttttttttcaccaaaaaatgtttgacttaatgtacttataatgtttcactatgtataaatctaatgttgcagtgaactgaaacattctttcgctatttgctgaaacattgttttcatataagttgaaacaacacccgatttaaacgagtgaaatatttttgatctacttagtgaaacaattccgatatacctggtgaaacatcatgcaacatttaaaaataattcaataataagcttttttttcatcggaatatatccatgtgtggtcttattttgaaattttaattacaacgaatttaatggtgtaattggatcattaattagataagtaatttaagagaaaaatcagtttaaagtagttttacacgtaaatcgggtgctgacgtcagttcagcatctgatttttccccaaaggatcgaacatccgacctgtaggcttttccacaaaaatctacttcccacttattcttttctgatacgtttatttcagttttcccgtttgggtcttggactcctacagtcctagtactagttttgacttactaagacgtaacaaagtcccattgtgtttggcattatttatctcacgtttaatttctcttccgtcgagagaaatcagagatgaagacgatgacatcagagatgaagccgccgtcatcgtcgtcatcgtcgtcgctgtcgtcacgaggtctcccgattgacgtcatcgtggagatcgccgagcgctccgacccgatcacgctcctccgctgcgccgccgcgtgcaggcagctccgccgtgccatctctggcgagggcctccgccgcgagctccgcctccgcaacgccgccggcttcgtcccggtcctcctccggggcttctactaccagcctctccacggcgcccacggtttcctccaagagccggtccgcttcttcgccgccggcgccggcgccggcgaccaccatggccagctcccggcgggcgacgacgccgttgagtcgctggccctcgggttcgaacccgtggaggcgcgcggcggcttcgtcgtcgctcggactggcaggtcctccggcgaagtgtgcaaccccatgacgggctacgtgctccccatccctctgccgaggaaggatttggtgacgtcatacctgctgctcaccgccgacgatggcgtcggactcggaccgagctccgacgacgactccgagctccaccggttcaggctcctcgccgtgcagctctgccagccgacgaaccaggggcggcggcttcgactgaagatgcaggcgttaaccccggtcactggcagatggggccccaccaccaagattcccgtccatggcgtcggcggcgacatccaccaacacccgggcgccgagctactcggccggcatcccgtcgtcgtcaatggcgccgcctacttcctcgtcgtgtcccactccttcgaccgccagcgcccgcacccgccgtctcactacttcatcctccgcgtcgacgtctccgaccacggcggcggcgacggtagaaacgggacgacgaaggccgcgacgatcatcccggcgccggaggggctgaagccgccgtcgtgctcgcgctgcaccagcagcgaggcggcggcggcggtcgtcacgtcgaagcagctcctgctgacgccgtcgcgcgacaggaggtcggtggcgctgctcgtctgccggaccaccagggtggagatccacacgctggacatgctcgcggcgccgtcggcgtgggcgcgcgcgacggaggtggtggacacggcggcggttcgccggaggccgtgcgacctgtcggagtcggaggtggagctgcattggtccggcgaggcgagcggcgccgtggtgctccggctcggcggcacggtgtgccagctggaccgagcgaccatggcgatccgcacgatcgacgaggagttccccgagtttcgctacaggagtcgccatatgttgctgccctacgaaatgggtttgtccagttgggttccttcgatatctacatctgcataaaaaattttggaacaaaatgtataaatatatacagttattttcaccgattttatacaaatatactaccatcattgcagagcatatgatgcgagttcgcgatggtgcgtgtgttcgctcggttggtttggtttgtagaatgaaaatagctcgaaaactaatgaaaaccacctatactgttatcattttctttcagaatcgaaatcggaaacctgcaaacgaagctaacacaaatcggagcaaatatcaaaagatatttatcagaatataaaaaccccgaaaacttaacttttgaaatcaacaaaaagatatagcccattattttttctaaaacaacaaatcaacatttctattttttattagttttagtaataatacaactagttgtatagtttacaatccagaagagcaagaattatattagttgatctataactctaattagcatgacatggcctaaaataattctaattaggcaaaagaaaaacatatctaacagcgctaaaataaatcggagcgaatacagtaacggatatttatcggaatataaaaatctttaaaactgaacttttcaaattaacttcaaattaacgaagagatatagcccattattttttctaaaacaataaattaacgtttctaatttttatctgttttatagtataataaaatacaactagttgtatacttacgatctagaagaacaataattatataagtctattactgtatttattatatggcatggcctaaaataattgtaattaggcaaaagaaaaacatatctaaagcaccttcttagacctaagggtggtagtttccccattggggacagggctcacccctacgaagctacaaacggggcattatttccacccgatggttgaacggtgcgggtctcaaagttatgcgggtcccctgttacaggaaacctagaaaaacaacttatcatagccgaaaatgctggggatcaggtaccctatccggcggaaaaaaatcgggcgccctcccccgcgcgcgcctccgcgaagaaaacagcgccctctcccccacgtgcgcctccacctgcctcccacgcgctcccaccacttgcaccccgttgcaacaaatctcccacatattacggaaacccccatattaagtaaatccgtttcattttctgtttcaccaacaatgttttagctagtgtaattataatgtttcactatgtatggatgaaatgttgtagtgaattgaaatattcttttgtaacaaattacccatatattttggaaacgctctattaaggaatccgttttaatttttgttccaccaataatgtttcagcaagcgtactcataatgtttcactatatatagatcaaatgttgcagtgaattgaaacgttctttcgctatttgcttaaaatattatttttttataaggtgaaacaacgctcgattttttgagaagctattgtttcatatgttgtagcaaaatgtttcatgaggtgatttggttgtgttttagcctttaaacaattgaacatttttcgatctacttagtgaaaagtttcgatctacttggtagaacaatgtgtaatatttaaaaataatttaataataagctaaatatttttttatcggattatatccaagtgttgtcttgttttaaagattttattgcgatggattaatggtgccatcggatcataatttggataaataatttaagaaaaaatagttttaaagtttgcttaggaatttttgctggcatatgcaagcatgatgacatatgattatgtgggcacctgatttatctcagaaaaaaatgggcgcccaagtgcctcaattaaccttttaattagtttcggtttctcgtttgggctttggacttcctagctacgtgcatgaggtgcgtcagagtcatcagccgatagagatcagatcgagatggaggagccgccgtcctcgttgtcgtcgccggctctgccgctggacatcgtcgtggagatcgcggagcgctccgaccccatcacgctcctccgctgcgccgccgcatgcaagcacctccgccgcgtcatctccggcgagggcttccgccgcgacctccgcctccgcaacgcggacggcttcgtcccgggcctcctccatggcttcttcttccagcctcgctgccccagcccccattaccacggctacaactacgacccgctccgcttcgtcgccgccggccgccatgatcagctttcggcggcggaggacatcgccagcggcggcagcggcggcggcggagacacctatcagataccgtccttcgtatccgactccaaccgcgtccacaagaataaacgttctcggcgcatcgaacccgtggcggcgcgcggcggcttcgtcgtcctcaggaccggcaagttctccgggaaggtgtgcaatcctatgacgggctacacgcggcccatcgacatgccgaggaagacggcgaagggtgaggggtcgtcctacctactgatcaccgccgacgacggcggtgacggcgtcgacgtcggagtgacctccgacgaatccgagctccaccggttcaggctcctcgccgtgcgcctttttgcgaggacgcgcgtggaggtgcaggagttaaccccggacactggcacgtggggcccagtcaccacgctccccgtcgtcgatgccgatcactacctccacccgcaccccgtgctggtccgcccacccgtcgtcatcgccggcgtcgcctacttcctcggcgagatgtccgggagagacgaccagacataccaactcctccttcggatgtccctggaccgggagagcttgggccggcaataccaccactcgccgccgtcctacagctacttcatcctcgccgtcgacgtctccatccgacgcgacggcgagaccggaacaacagcggcggcgacgatcatgctgttgcctaccgaactccgtgccccgtcgtacaccggcgaggcaaccgtcacgccgacggcggggcagctcctgctttcgccgtcgtcgtgcggcggcggcagaaggtcgtcgttggcgctgctcgtcggccggagaacccacgtggagatctggacgatgaagctgatccgccgtgggatggccttgctccggatggcgtgcacaatgtttgacgccattgacttcttagcacatgtttaaccgttcgttttatttaaaaaattaagtaattattaattcttttcatatcatttgattcattgttaaatatatctttatgtaggcatataattttatatatttcacaaaagtttttgaataagacgaacggtcaaacatctgctaaaaagtcaacggtgtcaaacatttcgaaacggaggagcgagtatattcctgtgaaaccgatgaaaaaaaatatttttttaattgatttcataagtcatcactctagaaagcatgagtcttctcaagtgaaggcggcgatagtggcagcacgtattgtatattagggttcaggattggggtagagataataacgggttggcagaggaggaataacaaaaagacgctgttagtgacgtaggagacaccatgatagaagcggatgcacacatatgcatcgatggcccgtgcaacactaccaaaaaaaaccattaacactagcagttcagaaaccctatcatatcacagctattgttttatcggacattaatattaggctagcaacctattcaagaatcgtactaatgcccattttagggctaaaaattgtaaatttctataaattgatagtgatacttgagattagatactacaattatctaaaaaatacaattactaaatttcatgatctcaaattcctattacaattaatttcagaatctcaaaaatcaacagatcacaaattcatgcgtacaaattcaacaaatccacacataatcacacaaatcacattcatgaggaacaattaggatcggtcgactaggggaggtaggaaaatcgatcgctcccctccccccaccactaccagagagtgggagactaccgtgtacctcagttggttaccgagagtgttatatggaacacggtaacgtttaaagcataccgtgtgtgtacaaggaaaaactcgggaagcggctaaaaatgccgtgggacgaatcgagaaacacggtaagtgtgggacccatagtttctgccgttaagcgcgcggaatatttggtctggcgcgcgggatcgccgttggcgcaggcggatggcgcgccaagatttccgttggcgcggctggctggcgcgcctgattttcgttgccgcgcgagtaacaggagaatcccgtgcgagttacagccgaaggcccacatgtcagcccaaaatagagaacaacaaaaccctagcccttttaatcgatcccctcacttccccaccccctgccgcctcattctcctcgccacttttcccctttctgatttttcccctctcttcttcgcacatggcaggatagctgtgcgccccagcgtcagtccgccgcacggccgccgagcaacgctgtgcattcctggccgtacgtgctccctgcatgtccacgtccatctgctaggctccccttcgttgtccagcttgagcacacctcatcttccatccagctggtggtatgtatatgttgagttttttcttgaatcgtatgtaaagttgggtcttggttctagaaaacccatccattttctcccaagaactagaaatagttcggtgtatgatttctaggaactgtatctcattttaatttcttgtaataccacaagtaccatatgaataagttgttgtgctttgtaaataaaaacaatattagactacaaaatgatgtgggtgagagttcttgcactgtcagaataatgtgttttcatatttgtgtacttgttgatggatacatattggttaggcaaaacttgccctcttttcagaaaacataatggttagtatgagtgtttgccacggccctacttgtttagatcgatgttgaatggttgaatcgggttggaatgacagcaccatgttgtgtgatgatctgcaatgctatggtgtactacatctttgtatcgacattttataataggcattattataccatgttgctactatgtagtttttgacctgtttaatataatactgcatatcttaattttgtagcaatatgcggcgattgagcttgggctgcagggaggattccaatccttcagatcaggctgtcagcgctgctatcttgccgagatgtagaacaaggtcctcaggttcccaacaacctgataattcttctaatttggatgagatattggctggcgaagaaacagatgaggaaatgttttttcgtggtcccacacggatgccaccacgacctacccgagatgaggacaaacctgtgctgactccaaaaggagataggtaaataggctaattttggtatgtttcattagttgaaatatgaaggcttgatctgtttgttcattgatttgcacaggcaatggcaggctaatgattttgggggcaacattagggtccccactggcatcctgaccgtgattattaagcattttttccctggcattgtcaattttaaaggaagagatgagccagcatggagttggaaacattacaggattgcaccggacgatccagaaagcgctatactgaatcgcttgccaagccgtctccatcgtgttgaggaagatttctgggtttgttttagagcattaccttctccaaatatgaagtacactatgcattttattgtgtcttcagttttcatagtttatggccaatttgtgctgtacaatactaaagtatcttaataccacacttttcaatgtcaagcaggctaactttctgtagttgcagctttacttcaggtgggcagagagaacggaacaagatgctagaaaggttgtccgcaattgtatcaagcaccttttttcggacctgatttatgaaactcgtatcctggccgtgctcaattaccaaaggaagattttaaaggtagaaacttctcgggatattgcttgcaggacatatctaacagaggaagagtacctacaggtgctatggttgttcattgataatttgttgtgatctactgatcagattagtaattaataaatctgtgcttctcctataggtagaaccatggtggttcctaaaggcaaaaaatgcgtggcgggagttgatacgattgaagtggtgtaatcctgaatggcaggctagctcacatgctcataggatacggagggagaaaatgacatggccatctcaccgccaaggcagtgctaacttgagtcgtttccaaaaaaatttggtatgtgcatctatgttgaaacatgtagcagatcatggtataatatatatggtacccatgttctgtttttggagaagaagaaaaagcgggtagtgtctcaaatggaggcctacacagaaggaaggggggaatatggagaggatggacgattcagatgtaacacacatgcaactgggaagcttgtaagtgctgaatatttagtggtagtttatcatttgtgcatgagtactaatacaccatttgatctgactgtaggaggcctataatgaagcttatgttcagctgcatggagcaggaagtgattggcgcaattctcccattgatccaatggctgtgcacatggctggtggtggaaagaaacatggtcgattcatgatcggtgatgggcacattgactcatcagcaatctttggtgacagttcacttaacgatccacgtcctcgcaggagactgcggacaaatcctgacaacacaaaccaaattgaagaccttgagcggcaactacaagaggagcgcgaggcaagagaacgagagcgtgaagaaagggagcgtgagaaggagagggagcggcaggagtgggagcaggagaaggagcgtgagtgtgaagagagggcacgagagaaggagcaagatagaaaggagagggagctagagcgcaaggaaagggagttggaaaagatagcgtttgaacagaaatcatcgttctttgaagttgctttaagagtaagtggttataggatccatctagtagtgttttcattatttgagggcttgaattctgtgatggtcgcactaactagtgtacatgtgaaatggattgcaggctatacaacttaagctgaacattgacttaccttcagcctcaggtcctcctcccttgcctgtcatgttgactaacccagtaagtatttgatacatggtagtctagctgtgcatgaagtaattgttccccatataacttatgaggactaatattaaccattttgtttgtaacataaaacaggctttgtctgtatcttcggctctgaatggaaacccattctgtgctgaccatggaggggctgctattgtttctggtgcaatttagatggttcagcttgacgcagcgagcgcaatctgaagataattatgactttgctactgctggaaagaatggactagttctacatgcctggaacatgtggatgtgttttgtaattaaactgacctagatggtcatggccatgaacctgagtagctgttggttgtggctgttgcctttagtcttttgttcttagttatatacgtttactttcctaagggcttgcatgaacctgagtccatattcggactctagtagctatttcggtgtgcatgttgccttaggtacttttggtcatagatgttgctgtgctctggagtttgtgaaccggaagtttggtacttttgattggaaatgttggcatacagtggaacttatcaacttggaacttatgtggtgtggcagtggccactgtccagatataactcacgcgttcaacaaaactgatgactgatattatttcatattttggagtgaatatctggcaacttatggaagggtcgcacaaattagtaacaaactaggctcggttagtgctttccggtactattgtcttttgttcattgtcaaccaaattatcactaaaagatgtttatatattatgaatgctttcaaattaatgccatttgaaatttttttaaataggagtcccaatctcaatagcatgacaacaagctgatatcttttttagttgaaagttagaaatgttcattgtttaaaaacattttaagatataaagctaaacatttcctaagaaaaacaggtttgaatatttggatagcttgttgaaaaattaaagataaacgaaagttttttcttgaaatgaacgcaaataaattctgagatagacatctgaacaacacttttaatcaaaattataaatttgaataaatttgattaaattaattgaagaaataaattcttattatatacagcaaaccaaagtttaattcttaacgaagttaaaaaggaaatagtttttgtttagcaaaggcacttaatgcaaggatcaatcaaaatttagttcaaaaattctacaaatcataacagaatcaaaggaattgttaactaattttaataacacgcactccctccgattcgtattatatctcgctttgactattttgtagtcaaaattttttaggtgttgaataagtttgtagaaaaatttagctacatctacaaaaacaaatttgtttgataatatgttggttttaagtaaaaaaaaatgttgctatgttttttataatcttatttaaaacttatctactttttttaatcacctcatatttttctcatcgtcacacgggtcgtcctgcgtgacgtggtacttgcggtgcgccgggtggtgaaggcgaggacgggacgggcgtcagcgaggtggacgggatgccacggcgagggagacgggatgccgcggcgagggagacggggtgcgcggcgagggcatagcttgcgtccacggcgaggaaccgtatgttgttcactgactgctccaccacctccgccgccggtggctactgcgcgcggagggcagtcggctgtcggcggccgacggcgaggcatttttgacatgaaacaatggcgacgttcgcatgctcgactacgtccgttcctcttcttcttccttggttaaggccaagtaggcagaggacgagcgggcacgcggcatcaatctttagaatatgagtggaagcgaaaatcatggaatttagatgaaagcatgttcattttgctagtttaaaaaaattgaccaacaaaaaagtcaagtcgagtaatataaaacgtagtgagtatttttttttagctatttcacattgtattgggaccaaacgaaatttagtacaaaatttcagtttgcaatccacacgtaaatagttcagtttgcagatttgttgagaaaaaaggacgaacagggtagtttgcattcctaatcttatcgtgtgttttggttagaaaacaatacagtaacgctcgtggtccacatgtcagaaataaatcgcggcaaaattctcgcaggcgcgcggcaaggtcgccaaaaatctggtgggtgtggccaagtcaccaaaatccccaatctctctgtcctcctctcatcccaatcaacccaccacatcgcgccgccgtccaaggccgccgccgccgcgccgcgtccagtccaggccgccgccgctgcgccgcgtcccgtcaaggccacatcaccgcgccgcagccagtccaggccgccgccaccgcgcaccccatccaaacccacgacgtcgccccgcgcccatccatctggtgtcggtcgagtacgagaccccagcccgcacgtgcaccgccgtgccgacgccaccagtcgccacgcacggaagaggattggctgctcgtccagcaaccctccctaggactgattcgtctcaggtgttgttgtcttgctcctggaatcctcattcggccttcatgtttcatcatcttttttattagtgaccagttctagaatttactagtcaggttgcggttgtactaagggattgcagaactaggttgttatgccatgtgaaagtttgtgtgattgatgatctgaactaatgtttgatattttatttcttagtcatacaaactaaactaggcctttattattcttgaacctttcatgaatagaaggacatttcctaacatcaatttattctatcactttgtcataactaggtacaatggaaactgatcgcagttggatgtacaagggccgtcgaaagtgtggcgaagttactgctgagtggatatcgaagactacagaatttcttgacaaggcattcaacagggagacaggacgtgctggtgtgttgtgtccttgtaactactgcaacaacacacgtcctcaaacaagagatatgatgatgaaacacctttgcaaatttggtttcaggccagcatatactgtgtgggtgtatcatggtgatacatatcctgcacgtgaaagcgatatatgccaaagcactgaagatgaagatagggtggcagagattgatcggatggatgagatgatagatgatgtccatgatgcttatgtctcagttgaggaggaagatccggagcctacagcgcaagctttctttcaaatgctgtctgcagcaactcaacctctccacgaacacacacaggtatcacaacttgatgctatcacacgactactagctgtcaagtctcagtatgctatatcaattgctggatttgatgcacttttaaatgtgatatgtgctctcctcccacaagggcacaaactaccagcaaacttgtatgaggcaaagaaagttcttagtgcattgaacatgccatatgagaagatagatgcatgccttaaaaattgcatgctctttaggaaagagaatgcgcagaagatgcactgtgataagtgtggagagagtaggtatgtggaggttgaagacagtaatggtcacaagaaacaattaactgttgccaggaaggtacttcgttatcttccattcatcccaagaattcagcggctatacatgtctgaatcgcaggccaagcaaatgacatggcacaagaatggtcatcggtaccatcctgacaagattgtacacccagctgatggtgaggcttggaagaaatttgatagagacttcacaggcttttcaatggaagcccgcaatgttagaatagcaatagcaacagatgggttctgtccatttggtatgggtttttcttcgtacacttgctggcctatgtttgtcattcctctaaaccttccacctggtgtttgcatgcggcagcacaacatgttccttaccttgataattcctgggccaaattatcctggcaaacacattagtgtattcatggaacccttagttgatgaacttatacatgcttggcagcaaggtgtgttgacatatgatcgtgccaccaagacgaatttcatcatgcgagtctcctttctttattctatccatgaccttccagcatatggtatattttccggttggtgtgtgcatggaaagatgccatgcccaacatgtatggaggcactccaaggaaaaaggttgaagtttggtggaaagtactcattctttgattgtcatcgccagttcctcccaattgatcatagttttagaagtgattcaaattcttttctatcaaacactacagttagcaatgaaccacctcttcgtctctcaggtcaagagatccgtgcccggttagataaccttgtccctgctgctaatggagataagtttgtaggctatggcaaggatcaccattggacacatatatctagtttgtggagactcccgtactttcacaaactagtacttcctcataacatcgatgtcatgcacaatgagaagaatgtcgctgaggcaattttcaatacttgctttgacattccagaccaaacgaaggacaatatcaaggctcgccttgatcaagcagcactttgtaatagacctgaattgaacctcatccaaaaacatgcatctagtcagtgggtaaagccaagagctgacttttgcttgaatagagctcagaagaaggaagtattagaatggtttcaaacattgaaattccctgatggctatgggtcgaacctaaggagaggagtgaatttgaaaaccatgcggatcaatgggttaaaaagccatgattaccacataatgatggaacgtatctttccagtcatgttccgtggatacttgccaactcatgtgtgggaagtgctagcagaggtgagcttcttttatcgcaaactttgcgcaaaacagtttgatcctatagagatggcaaacatgcagtctcaagtaattgttttggtttgcaaattagaaaagatctttccacctggattttttaatccaatgcaacacttaatgattcacttaccatatgaagctagcatgggtggacctgtgcaatttagatggaattaccccgttgaaagaggccaaaagtatcttaagagcaaggttagaaaccgagcacgtgttgaagcttccatagcagaggtttacatactagatgaaatctcaaacttcacatccatatactttcctgatcaagtgcagacaattcacaatcctgttcctcgatacaatgttgctactcagtctactgattgttccctaagtctattctctattagggggattctactagtcgtggagtccctcgacacctaactcgtgaagagtggaatgctgccatgttgtatgtgcttacaaaccttactgaagtggatgactacattgggtattaactatgaaattgatatgagttacttctagttcatagctgcatataattttactttaaatcagtgtgtgcatttttatcttgcaggaaattcatagatgaggaatggactagacgaggtgtcccaacaaggcaacaacaagagaatatcttacggaatggtgctgggagagatcgtcctaatttcgtatcttggttctatcaacaagtaatttctttagcccagactttacttatattatacgcgtagcaatgcatatcctttcagatcagattaggaaatctagctagcttacttcgatgtaatatcttgcatgtgtatacatactttcctaactgttgaacattaagttctttcatgaatgttcctgcaactaacctaggtaatccccatcaaaccaataaagtattactgctaaaactctaaatttggtgacttcttatatcagtgctataaatttggtcctacaatagtaaagcacatttggattagtgcaagttcctagtatgcatatggctttttcatactacaatctgagttaatttttttacaagcattatgaaaatagtactgaacatgtatgtacatgtcattaatatggagacacttctcaattgatcatctgttaggtcggaaatctggaaagaataaaatccttgccaatttctactaacaaaaagaacctagccaattaataacttgataacttcagttttgaaattcaagacctcaataattaatagtgccttcttccattttctttctgttttcattagtttgcagtttaacgcctcttaattgcatttgtgtcaataacctaataatacttatgtttttctataacataaccttcaatattgccataatagaacattatgccacaatttattgacacattatttcctttcatttcactgctagagtatgttagatgaaactatgagtgatgatttgaggcaagtagctaaaggatgccacactcgagtcttgctatataatatgtatgatgtgaatgggtatcgattccgaatacacaaatatgaacatgagaggccaaatgcaactacaataaatagtggtttggtgactataggacagggagaaaatagtgacacaactgagtattatggttacatcaaagaaatagtagaaattagctttgatggcagaaaacctctcacacttgtgctcttcaattgccattggtttgacccaagcaaagtgaggtatacaccaagatatggtctggttgaggttgctcatgcgtcaatccttccaaaattcgaaccatttgttttgtctcatcaagcgacacaggtgtattacatgccgtacccatgtaaatctgtgcaagacctcactaattggtgggttgtgtataaggtgcagccaattggtagactacaagtacccaatgatcaagattacaattttgttcctaatagcaatgttgtccactatttccaagaagatggtctgtccggcagttttgtaattgatcttggtcaagaactcaacaatgatcctgagcaagttgccattagcagggatactgaagatatttgcaatgacaaggacttgaagcttctcaatggatcatctattcaagatgaagatgatgatgacgaggatgatgaatcttattgcacttcctcatctgctgaagatgatgaggttcccactagtagggatatcttatttgacgagtatttctaaggtacatggttcatttttttgatggagactataatgccaattttttatatcctgtgcctccccaaatgaatatttcctttgtcaactatgcacaagaattaacctttcataaactagttgcgtgctgtaataatatttggcagtcatcttactttcgtaaaatttcaggcatacaattggatcattgcaaaggattgcagttgattggtgctgtcaatacacaaatttggagttggttactcactagcctctaacatttctctattgcctccctgggagaggttgtaagaactcagactcaccttgttactattgcattatagccacttcagacagccatttatattgtgttcttgtatcattgtattcaaaaattcatactgggataatatacagttaatgttcacctgacatttgtgtggttccatatgtgatgcttgtctgtcatgtttggatgatatgtatatgcatacatgttagttgcctgcctactgtatcagtgcagtacaatcgtgaatgtgtgaaaccctgtacaatgagctacataatcttaccgtgtattcatctcaaatgtcaccatgtgctaaatctcacgggaagaatttcaaccttcccgggtcactaaaaactctcggtaaggtgtttcatgttcctgtgttttatggatttcttcccgtgagttccaaccaccccgtttcactccgttccatgcatgacgtgtcgttaactggaaagttaccggcagggtgttttcacacggtaagctttcagcacatcctaagttcgcaagcagtttctcacgggaagagtgacacggtaaaggtgaaaggctgccgagtacaccttcccgagagtttgctcacaggaacgaccttaccgtgagttttagccctgttaccgagttgtttaggcacacggtagacttccattccctggtagtgcatgtgcgcacctccactggacccacccacttgtccctccccatgttacacaaaagatgttttacctagtgtaattataatgtttcactatatatagatctaatattacagtgaattaaaatattcttttgcaacaaatcacccacattttggaaactctctattaaggtaatttggtttattttttgttccaccaaaaatatttcacccagtgtactcgcaatgtttcactatgtatagttctaatgttgcagtgaactgaaatattccattgcaataaaaaacccacatattttggataccttctattaagggaattcgtttcattttctctgttccaccaaaaaatgtttcacctagtgtacttataatgtttcactatgtatgaaccaaatgttgcagtaaactgaaacattcttttgctatttacagaaacattatttttatataaggtaaaacaacatccgatttaaacgagtaaaacattttcgatctacttagtgaaacaattccgatatacctggtgaaacatcatgcaacatttaaaaataatttaataataggctaaatttttttcgtcggaatatatccatatgtggtcttgttttgatgatttaattgcaaacgaatttaatggtgcaatcgggttatgatttggataagtaatttaagagaaaaatcagtttaaagtaattttgtacgtaaatcgtacaccattttttaacctcctcccatcgggcgtgtgcgctagagccggagtcgcgtcccacatacattcatacatcttgtagcgcacaggttatttttcgatccgttttatttcgcttttgtcgatagtttcggtattggacttagtagttacgaggtacgaccaaaaccttattggtaattaacgtcggactcatcagccgagatagatcagatcgatatggaggagccgccgtcctcgtcgtcgtcgccggctctgccgctcgacatcgtcgtggagatcgcggagcgctccgaccccatcacgctactccgatgcgccgccgcatgcaagcacctccgccgcgtcatctccggcgagggcttccgccgcgacctccgcctccgcaacgcggacggcttcgtcccgggcctcctccatggcttcttcttccagcctcgctgccccagcccccatgaccacggctacaactacgagcccctccgcttcgtcgccgccggccgccacgatcacatcgccagcggagacaactgtcagataccgtccttcgtgtcggactccgacgagaataatccttgtcggcgcatcgaacccgtggcggcgcgcggcggcttcgtcgtcctccggaccggcgagttttccgggaaggtgtgcaaccctatgacgggctacgtgcgggccatcgacatgccgaggaagacaagcaagggtgaggggtcgtcctacctagtgctcaccgccgacgacggcggcgatggcgtcgacgtcggagtgacctccgacgactccgagctccacccgttcaggctcctcgccgtgcgccttttcgcgaggacacgcgtggagatgcaggcgttgaccacggacactggcacgtggggcccagccaccacgctcgccgtcgtcaataccggctgcctcggcccgcgccccgtgctggtccgcccgcccgtcgtcgtcgccggcgtcgcctacttcctcggcgagatgtccgggagagacgaccggacataccaactccaacgccggatgtcccgggtgagcttcgacccaccataccagcactcgccgccgccgtcctacacctacttcgtcctcgccgtcgacgtctccatccgccgccgcgacggcgagaccgggggaacaacagcggcggcgacgatcatgccgttgcccaccaccgaactccgtgccccgtcgtgcaccggcgaggcaaccgtcacgccggggcagctcctgctggcgccgtcgtcgtggcgcggcggcgacaggaggtcgtcgtcgttggcgctgctcgtcggccgaagcacccaggtggagatatggacgatgaagctgacctgccacgggatggccttgctccggatggcgtgcaccaaggtcgtcgacttgatgggagtaccccggagtccctgctcgccgccggtgtcggagtcggaggtggcgctcctgtggtccggcgacgcgagcggcgccgtggtgctccggctcggggggacggtctgcctgctggaccggcggcggcgcgccattgtggtccgcgcgctcggcgaggagttcgtcgagtttcgctctgggcgtcgccatgtgttgctgccgtatgaggtcggtttgtccagttgggttccctcgatttctccatgattagtttcgtgggggaacttgaagtcaccatctgcgcacctgtaccgttggttggtgctagtacataagcgcccaaaataagcgcaaccatttgtttcatgtgcccaactttaatcttttgttacggataaagtattattcatattttataatctaataacagtaaaaatactaatcataaaaaattttaaataagatggacgaaacaagatgaacaaagttgggcatgaaaactcattgttacgtttattttgggacggtgagagtatgtggtgagtctacttccttttacgaaaacaaaataagtttaatcaagttaattcctgaaatgatgtttgtggtgttctgtagggcgtggaaaattttgaaaaaaaaattcgtaaccatgatttttaaaggaaattctatttcccacattgattcacttcataaattgcttgaaattttaataaaatttctagaaataatttattaattgaactttaatcacgaaagaaaatggcggcgtgatagagcaagcaaaggggtggcaaatgacaatagaggggtgcagtgagtgggccataaagaagcattatgtcgacggctgatgggatatctacaaactataaaacataatactaatgactattaggatcgatattttagaattacaatgacgataaagagtaatatttaagggtaggccataaaagagtaataactccgtcaaggaataggcacgcggcagcgagcggctccggcttcaccggctgagaggcacacctaagggcggcgccaagccaagccacagcgtcggcggtccgacgaagcgggcgtgcaagcggtgacgggcaccgagagcggccgggcttcgtcggcggggggtgggggcgggggagggggtgccaagccaactcgcacgcatgggacggtggaggaactccaagacggcgcgcgcacagggtgaccaacgcgacctttgtggaggtaaaggtgcggtggtgtcgcttcctagcagtggggtttcccggtagaattagggcttcaaatccggtaagaatctgaactcgagcttagttttcttaatttgatttggactagagaaaatgcccgtgcgttgcaacgggtaaaaacgtttttggatcgtatgcattatactatttgttttggaccaaaagctcatttattcgttccatttcagtcctaggccagcccgctacctctctttgcttggcctgtctctctttgatctagcccacaggtaaagttgtaggcccaactagcatagcccactgctgtcttcaacaatggataacatagcaatacctcctcctccggccacctcccgccgtcgacaacaacctccccttctcttgcgtcgctggccggcgccgccggcatccgaacctctcgtgacctgtgggctgtggctccgtgctcgttcgccgtccgctctgcccgtcgtcgtgctcgcccaccactagccgccgctccactgccgcgctcgcccaccgccgctccgccggtgaagagaaaagtgaagaggagaagaagaaaagtgaagagaaggagaaaaaaagatatgtgaagctgacatgtgggccccacttaatttttttattttttttgctaactaggatgccacgtcagcaaaacagggcaaaaatactgccaagggacctccagtgaacggtttgaatgagtttagtagcgaacatttctggttttgtggttgagggatcttaaaaaatctcgctattatgttgagggaccaccggtgaacttattcctatttggatcgctatacattatacacttcattatactccttggttttgggtcaaaacccagcccagtgccttatctcttttacttgacctagctttctttcacatagcccacaaggggagatataggctcaactcgcatagctagttgattgacgtcttcaatcttcaaacaccggaagagtgtctttttttgttgtcattgttcctttttttggtcagtcttttttctctccgtatttttttcccatcacatttgatctgcctctaatgcgttccctcctcattaaaaaatcgattccccactactactctatcatttttcccatgatttttcttttcatttttccgctttaatttatgggatctaatatctatttaaaagtcactgtttatattccgagttttaccaatttgctcagattttgataaaaagggaaatagtagatcaagtgtataaaaaccctcaaccaaatttaggagatcgaatagaaaaactcatttattcttcattttcgatcccagcctagtacgttatttctgtgcttgacctacctctctttgacatagcccacaaggggagctataggctcaactcgtatagctagctgactgccttcaaacccttcaaacccttttttttcgttggtcctttttctatccttttttcttttttggccgtcacgttagatcagcctcctagcatgtgtttggtttggggatgggatgggatgggttggttccatccctgttttttggaatgggatggttctgtttttttgtttggttgaagggatagaacgaaccctgtttttagtttggtttgagggatatgatgggttggaatgatcctatcttttgtttggatggagggatgaacatgggatgcttggatacaattacctccacacattagttggtgaggttacctctcatagtctacaaactacaaaataatatttctacatgatgaccacactatataaaaaattaaaataccctccatatcactatttttgaaaataagctccagcaacttcatttcagcatattggacaagctacagaataatgacaagctacccaataatgaacaatactagcagttccataatcaacccctcaaaaaacaatcacacataattagctcacatctgatcccatttcaacccatacatagagtccaagccaaacataataagaagtttcaagtcgtgcacataatagcaaattaaggtcttacacataatagcaaatttaagtcttgcacctaagaattctcggccttaaacatattggcagtacaaagtcatacatgatcatgggcccaccggcaacacataataccaaaagaactacccaactcatctaacaacgctacattgatccagaaaacttctcattaatgaacaagtggacccaatgtatcttgttttcgaaaggaagtccatcaaaagctctagcaatgtgagggttggcaaccaaatgagcatagtaaacagatacatggatctcctcaaacccaggaaggcttttcaaggtttgaaataaaccatctggcagtttattgtctggctcagcgacctttagtatagcagaagctaacttgtcaccaacactggtgaatgcaccaatcagcccatcatcttcaatttcttgtgttctggctttctttggcttgcttgcagatgatgcctccccacgatcatcagtagtggcagggccatcattttcctcttcatcattttcagtttggacatcctctgttcctaggactgaatttgagtcctttgcatactttcccgtagccatggtgctaccaaatattgtaagcatctcaccatagtgtgcaagaggtttgttaaaataatcagcatcagccttgtgatccttcggtgaaacaaaatttttttaagtaaatgcaataaaacaaatgaatggaataaagcactaggtcaagacatttacctcaatatagccattgtagtgctcatcatcaagagtaatgatgatatttttctcatcccaaccagcggcactcactttcctaagcctatttatctttgtaaactttctttgccatgtcttcaaatgattcttaatttgctcacccgtgagagtgctgttaaacctttcattcacagccctagcacatgcattgagatgcactgccttgaagccagatgaggtccttgtgcctccggccacaagattggcaaggtgtttgagcatgaaagatgacatagctgaggtccatgaagcatgggtgcttcctcccttgccactattgttgtccattttctacctgctgtcaaatgaaccagaaaatatccatttagcaatatgtaaacctagaaagtgtccattcagcaatatagtaaacagaaattgaccattcaccaatatagtaaacagaaattgtccattcagcaatatagtaaacagaaattgtccattcagcaatatgttaacccagaaattcaccattcagcaataaatcaacccaaaaaaattcagcattcaactatcaaccaatgaaatgaccattcaacaatatgtcaaccaactcagcattcatcaaaccataattcagcatacaacaatagatttatccatacaaatgcaatttagcaaatggactacaacaagctgtccatacaaatgaaatacataaaaatgttcattgactaatgaaatattgtaaataaggtagaaatacaagtagcccagctacatattacattccatgatggctattacggtcagcccacatctgatcagctaagccctgcctgaactgaaccatcaatgcatggtcatttgcttggccggttaacgattcatcaatgtcctcacttgaccaatcaggcggagctataagctcatcaattccgtcatttacgacccaattatgaataatacaacaagctacaacaatatctacttgagttcgaaatgggaagaatggagtggcatcatcaagcactttgaacctcctctttagtgacccaaatgcacgttcaaccgtcacacggagggatgagtgtctaaggttgaacaactccttctcattttgtaccggattattcccccattcatttagatggtaccgaacagcacgaaaaggaggcaagaatccttgtttggctccatatccagcatcaactagatagtatttgcctattatatgatcgacaagttggtcacattcctaaatatcaacatttgtcatggataatttgataaactattaccttgtaatctattaccttgtgggacacggaggccattttcacgttccaaagcatctcttaaaactacagcatcatgtgctgtcccctcccaaccagccaagacataagtaaaccgaagatcaaaatctacggctgccattacattttgagtggcatgggacttcctaccacgaaaagaagactccacattcttacgaaccgaggctctaatatgtgtgccatcaatagctccaatacaatcctattttgtgttcaacaacattaaaaattagggaccatatatcaatgttcacataaagataaatttagatagggatgaatctcagaccttaaagtaaggatcccatctagggtttcctgctattttagttggagtgtccaatgaggggggcctgattagttcatctcgtagctcaccgattgcatgaaggactttgttgaaataacggctaactgtttctccagacctatcaaaattagtacgaactaatctatttctaaggttatgccccactgtatgcaaaaacatagccacttgttcctcaatacacatgtgaatggtatcttcaagtaaaccacgatccctaaaaagcttacaaaaacgaaagaaacttgcccttctaagtctaagcatgttgatacaagttgtatcgttccaccaaattttcgtttctaggtactcaattctttttctatccctttcaaccattgggccatatctaataccttctctccttgaacacctctttctttttctagacctaataatcatggccatcatcgacaacaataaatttgtagctgcaatacaaactaaaagcttggtcctcttgtccatctacaatacaacaaaaaaaaacacatggacaacatctactgtcaagcaattgataaagggatttcacacattcttcaacaaaaacagatatgcacagatctgaaaacgaaatcctcatccaaggtttagggtctttttaccgtggagattgggaaccccgatctgcagttggtggctacgaacacttcgaattgaaggtgatgaggtccagcgccgccgtgtcctgctcgcgcgccggcttgagctcccgagagcgtcgccgtgcccctgctcacgcgagcgccgctgcagccgcgcgcgcctccgcagcccacgcccgcggcgctgctgcagccgcgcgccgcgccgcctcaccgcagtccgacccgcgccgcctaaccgcagcccctgctcgcgcgccggctcgagctcccgctagcgccgctgcagccgcgcgtgcctccgcagcccacgcccgcgccgccacagccgcgacccgccgccgccttgcccctgtgcgccggctcacccaggccaagcacgcgccgccgccacccttgcaaaccctaggaaggaatagacagagaagagataagaagaaggggaaaaaagagaggtgaagcgcttctgctcttaccgcgcgcgtgtcgcgagtcacaggtgcgaggtgggatcgtttcgtccgccacttttttccggatggggttgtcccgaatattgaaggaatattctcttttggaaccatcctatccctcctagtccctcaaccaaacagccataaaaatgggatgatcccatcccatcccgggatatcctcccaaccaaacacatgcctaatgcgttccgtcctccaattgattgaaaaatcgattctccactactactccatcatttttctcaatgtttttttcctttcaattctgctttaatttatggaatctaatctctatttaaaagtcaatgtttgtatcccgagttttatagattcgcttagattttgattcaaaggaaagaaaacggaaaaatgaggaggaatggaaaaaaagaaaaaaagggcgaaaatagccaaaaaaaaaagaaaaaaacgcaaaaaaagtgacggacaaaaaaatactggaatcattacatattttttaattaggtatatatataggtatatagatatagatataaatatagatatagatttggatttgatttggattttgcagctcagggttctattcaatttggggatttcggcaaaattgaaaccgattgatctcattatttccttcccttcaatttcttaattccactgctaagtgaaggttaattggacgtaaaacttgaaacttaaaataagtctaaacatagaagtgcataatgaactcaaactcaatcttattaacttaaattgaacttgaacaagagaaaatcttcactaagcagtaaagataagaatctaaatagattagattaaactagattatattaaacttatttaattcaaaattgttcatgtcgaatcaagatggctccgactgcttctaatcactaggatgatgtgaataagtaattgagtaggctaaagttaagctatgataccacaatattgaagttctaattcaagaccatattgctttagcctataaacaatcacattaaattacgaaaattaattctctgacctgagatgaagcaattgaagccgatgtctggttttgctactggttcgtcacctcttctcgacgccttttcacctttttatttgcagctggtggggctcgggggcaatccaaatagaattcttagtttcttacaaccgatcacggtatatttaaatctagctcttattttcttatttgattcggtctctgatgtctgtgtttttttttctttagccagcgttacatatgatatgaataaagttacaccggcccgttactacatatcatagagtactattcatcttacgtgcatccgccgatagacagagatcatcagatcgagatggaggagccgccgtcctcgttgtcatcgccggctctgccgctcgacatggtcgtggagatcgccgagcgctccgaccccatcacgctcctccgctgcgccgccgcgtgcaggcacctccgccgcgtcatctgcggcgccgccggcttctcccgcaacctccgcctccgcaacgccgacggcttcgtccctggcctcctccgcggcttcttcctccagcctcgccgcccctcccccgaccccgactaccagccgctacgtttcgtcgcggctggccatgccatcgtcggcggcggcggtggcgccgatcagatacggtccttcgtgtccagctccgaccacgtgtatggttctatccattggcgcatcgaacccgtggcggcgcgcggtggcttcgtcgtcctccggaccggcgactcctccggcaaagtgtgcaaccctatgacgggctacgtgcgctgcatcgacatgccgaggccgtggtcgtccgggtcctacctcctgctcaccggcgacgacgccggagtcacctccgagctccacccgtaccggcttctctccgtgagccttcacctgaccgggacggggcgcgagcggcggcggattcacgtagagatggaggccttatccccggacgctggctcgtggggcccaaccaccgcgatccctgtcgagatcgccggcggcggcgagtacggcagcccgcgcgccttgctgatccgcacgcccgccgtcgtcgacggcgtcgcctacttcctcggcggccacccatcgcttgtcttcgacctccaataccagcgccgccagttgccctacgactacttcatcctctgcgtcgacgtctccggcgaaaccgagatcgggagtgcaacatctccggcgacgatcacgcggttgccgaccgaactccggctgctatcgtcgtgcacgggcgaggcagacgtctcgccggggcagctcctgctggtgccgccgtcgtcgtgcggcggcggcgacaggaagtcgttggcgctgctcgtcggccggaggacgcaggtggagatctgggcgatgaacttcggcggcggctgcggcgccagcgccaggtcggccccgcgtctcttgtcggtgtcgtgcacgagggtcgtcgacttgacgacgacgggagtgcaccggagtccatgctccccgccgctgccggtgccggagtcggacgaggtgttcgtgtggtccggcgaggcgagcggcgccgtggtgctccggctcagggggacgctctgcttgctggaccggcggacgatggcggtccgtgcgctcggcgaggacttcagcgagttccgtgatgggcctaacggtgtgttcctgccgtacgagattggtgtttccagttgggttccttcgatatctccatgattttgtgagaaacgtgggattaccggaagtcgcaactcgcaagcaacaccaaattaacatgcgtgtgctcaattatactccctccgtttctaaatatttggcgccgttgacatttttaaatatgtttgaccgttcggcttatattaaaaaatttaagtaattattaattattttcctatcatttgatttattgttaaatatatttacacgtaaacatatagttgtacatatttcacaaaagtttttaataaaacgaacggtcaaacatgtgctacaaagtcaacggtgttaaatatttagaaacgaaggaagtagtacggaattgctatccttttgtcaatagaaaatctatcttccaatcttacagattttgggccactggatgaacttcgagattcgtgctccaagccttctccaatttcagcgacctcctattcttctttgacgccggcgagaccctagactccagcagaggaccctacgggttagggtcgcaggataattaaggtgaggatgggaggggtggggtgggggagggagaagacgggagagttctctagctttagagggatggccatggaaggtggcagcgcagcagtgggcagcgaatcggatgggcggagagacggcgacgacaacgccaaagctgtaggatcggaagctggcggtgggctgttgtaggcggcgggggcaaagcagaagggctgttaggaggaggtggttagtggtggtgccctgttgtcagagacagggaagacggcggtgcgtctatgaggggggaggggagcaagggccggccagggggtagggggctcgctggcttcgttgacaccttctggttagacgtcgaggcgggcggaagggcggaatgcgcgagaggaacgttagatatactttaagattcatgcagaaccgcttttaccctaggtaaagagggttctacatgaatcttaaagtatatctaacggtccattattcgaaagatagaaggtagaattttatgtcaacagatacattatagtatgtgcactattgttatcaattgtattgttttcccgatgaaggacaagggttttgggccgtttttcagggacatggagtggtcgatcatgtgcatgcgatggggctgtctaattgttagttcctaaaattaaaaataagaaagatcagggaagtttggatggcttagattgctcaagacttatgtgctacagtaatcaacattatatattcttccctcctcccattactcacacaacacctacataagcctgtactcctctatcttcctccgtcctacaacatttttcttcttcaagtccggcaacatcaagctcctatccccgctggtccttcctcatctctggcagcttgtgccatctgcttccaccaccactgtatctttaaccattattgttgcccctaaccttgcccatcgccagcttcccgtcccacagctacaatgctgcgctgcctcgttcacaccgccaccaatggtcattcctctatgtgccagaaaaacctccttcttctcttgtaccaagtaccacctcctaccctgatctaaaccccaagcctcaatccgtatgttctctattggagctggatgtgtcactgtcactagagaagaggaggagcttgccatcgctggaaatgacgccgtcatcgttgggaagctgcctatcctgcctctctcttgactgcctccaaagcggggtgctaggttgaaggtgattcacctgaaatctagtatttcgtgcacgtgatgggtgggaggcaagataaaaacgtggctcttgcgtagacatagaggacaatgttggctatgttactgatatactttatcatggttttggtctaaccattttcattagccttatgatatttgatgggccaacatattaagcttagggcccgttcggtagggttctaactcctaaatttaacttcaagagttgggtctggagtaaagttgtggaacagcctaaacccacatccacctttatggttcattttatgagagcactcctgccagctgcacttccttttacggtggactcgacccttagtgacgcgcggctgagggtccacgcgtgcagacacggtggtgatgaaggctcgcgcacgtggatccaatgatgacggcgggcgccctcgacccttctccttccctggccctccctctcgactgattctctcttggcagcattgactcgcgtgcggatccagcggtggcggatgccctcctttgggtggatccaacggcggcgggcatcctcattcgcgagcgatggctacacaacctctccattagcttcccacgccgacaccactggcactgtgccttctcccctcctgagttcttgatttcttccctggggtgggggtatggttgattttaagattcggttgtggcttgttcgggatgttttttatattgttgaaatctcatactgttgtttctgggattcagttcttggcgcaaggcatcggattagtgaaacctcaaaggtgacggttcttaaaccggcacctttgattcctcctcatgtgtgcctcatgcatggtgccagtttatgtgggattctcaaccggtatatatctatttatgtttctgtagtagtgttggtttctgtagtagtgttggttgagctctaactccagaagagaaagagctagagctagagccatatcaaataggttcttagtgggccaatttgccatatcttttgatattattgcaaatataacttactttctttttatgccgatttataatgggtaggatttctttttctattttggagttgttttttttaattaaagatgggtggtttttgatggagctagcggttttttttttttgttgaagggaggaatgaagatggctttgattttaaatttaaagtagttaaagataacgcatggtatccacatcaaattctgctagtagaccgtaattttaggggagttggggatttgtcccatcaccttatttctcattttgatttacttttatcttacctttttattactattaaacgtatggttgtttgtcttatgacagaagttagaagatgtaatccatttccattatctaaaaaaagaacgtaatttattaataacctcattaaagaaaatcaatgcaactgctataagtcaaaataatcagacttcaatccgtagtaagaaaagtaagttattgtgcgagatacattgatatggcatttgttttcgtttgccatgtcatgggaatttggagccgtacgtaactgaactcatgcaaggctaagttgctaatcaccaaatagttcgtgttcacaaactcagcatttgtacatttgtacgcacgcgagagtcgaagaggtgcgccgaggcttggaatgcaaattcgcgcacacgtgctagttagcaaagtagcgaacactagacccataaggcccattaacatcctctcacttttatccgtttctctagctgacgatgcttcttccttctccttcgacaagaacccagcgaggttgggatcatcttttcctccacctctgtcgaatgctgctccaactgctgctcttcctccgccctagtgagacatcggtgagttatcggcttcttattgacaaattcaaatctagaaaacttgtacctatttgtgtgggaagttttgaatttttgagttaaagtttttggatactatgatatggaagtttagggattttggtatgaagtttcggaattcttagcagaaagttttagattttgaatcgaaagttgtgtgattcaagttgaaatttttagtgtatacgtagaaagttttagtctatcagttaaaagtcttatattttggattcaaagttttacaattcgaattgaaaatttcagaacatgagtacaaagttttagattatgaatccaattttttttttgtaacttttggtttgatgttttgagatttctaaattcaaagttgcagaattgaatcgaaagttctgtaatcggagttgaaaggtttcaccacgatagagacgcatcgaaaaaaaactctcaaatcaaacgtgatgcttagtgtcaggggtgacgcgctgtcgtgatgcagttgtgcacgtcagtaatggtttcatgtgggctgcactacttgctgtcacagcgcatatgcactagcaagcagccctcctgccaagcagcccatgcgactgctggggcagggtatggctagggatgataatgggttaaggcccatgagttttttttttcaaaaatacttcttataatccttaaacacttttgactaaaaatatatagaaattaagctcacccttttacattttgtacgctgaaatgttattggacccattgcatgaccggtcgagacagcaaatcggcccaggtagatgagccggccctgtgcagagggcccaaccggcgaaggtagtcagtaataagtgagctgacggtctgtttgttggacggagtttttaggagggatttagagtctagagggatgtggctattaactgttttgtttagatgggggacataggaattttggtgggatgaggatggggaattgaggaatgaactccctccttttcaatatctgggtaggggcaggtaattgggagggaattcctcctttacttcgcgtaaacaaatctcagccatccgttttctttaatgatctaatctccaactaaactccctatcaatttctatcacctctaccaaacaagagactgggatgaaaaatcaaattcccatcttaatctcaccgtcaattccctcgtgtaaactcccaatcctcttccctcaagttgccaaacaagccgtgagtgtgagatctgccaacatatacgttctctctcttcgcttacgcctactccctccgtcccaaaatatagcaacctaggaaggaatgacagtccacatacatcaacttagaagggtcacattccctcctaggttgctatattttgggacggaggttgtaatttacaagttcagggggtgtttagatcatagtgtaaagttttagcgtgtcacattaaaatcatggagcaattagactttaaaagattcgtctcgcaaattagtctaaacctatataattagttattttttaaatctatatttaatattttatataggtatttaaacgttcgatgtgatatggcgaaaaattttaggtggaatctatacagggcctcagatgcaaaggatgaggacaaattaagccggcttcatgcgtggagcaagccaaccaaagcgctcccgctgccctccacgtctcagcacgcaccacccctacgtgtccccaagccgagcaacctcctatccatgcaaaatactagagcggcaatgcaaatctttgctctctctctgccaaacttgtgttcttgcgaccctgctctgctctgatacgtgtctgaagctgaaaacgatcgaagagaagatcggtcgaggttgccgaggaggaaggaaggaaggaaggaagaaggcgacgatggtggatttggtgaacggcgtgctcaactgggtggcgacgccggccatggtggccagcctgctgctcttctacccgccctactacctcttcaagaccgtccactccttcctctcctacctcttccccgacgacctcgcccgcaaggtcgtcctcatcaccggcgcctcctccggcatcggcgaggtgaggcgactgacggccacgggctctgctctgtgtatcagctttttgcaggctgactgtttttctttgaattaattgctctgatttttgtgtgtttggtcatgttttgccattgtgttcgtgtgcctgctttgtagtatcgcatctttgttctattatttttttccaaaactatgataactgtctgacagtttcagagtaaaatagtttgagcatgttgttactttgaagatcccaaattaggcgcgttgcgtacaatttgtaaaagttcgaaggatatatagtaccaccatatgtttgtgcatagttcaactttaggttgttgtaattctctgtttatttctgtatgccgagatgaagatttatttgcgtatgtcacgtgatgatttttgcagcaattagcatacaactatgctctgaaccgggcatcattggtccttgttgcaagaagagaatggagcctgcgtaaagttgccgatcaagcgttcgagcttggagcacctgatgtgatcattcttccgggcgacgttgcgaatcctgaagactgcaaaagatttgttcagaccgcaatcgatcactacgggcgatgcaagtctccaatatcactgatttgttcagtaaatttcttcagcaaaagtatcatttcagtacttcattgagctttacacttgtttttcagtggaccatcttgtgtgcaacgctggcatcgcaagtgttggcgcgtttcaggagattccagatgttactaactacagctctcaatttgtaagagcaacataattcttgatgagttcttatcagttcagtgtgtagtttattcaagatccgtaaattaaccactggtatgaactacttcattttcaggatgtgaacttctggggttcagttcagtcaacttttgaagctctccctcatctgaaaaggagccgaggaagaatcgttgttactgcgtcggcaaccggatggaatcctgttccaagaatgaccttctacaatgtaaattaatgtcctgcagtcttagtgaaaatgcatatgtgacagtattgagactgatgtttgtcttttgctcctctgcttaggctgccaatgctgcactgataaacttctacgagacgctgcggacagagcttggtagccaagttggaatcacaattgtaacacctgggtggatcgagtctgagatgtcaaaagggaaatttctcaaggatcatggtgaaatggaggtcgatcaagaaatgcgagatgtaagaacacccacttgtcaatttcacaagtccttctgaaatcacactaggctccttgatcacaacataagattcagacttcagtaccactgctttgaacattttttcatacaaagttctagactataagggggcatacaaagaaatctaaacttaggcttcattcgttcctgggcaatctgggggattgagagagaaaagcatctcgttttccgtgcgcacgcttaccaaactgctaaacggtgcgttttttacaaaaaaattctataggaaagttgctttaaaaaatcatattaatccatttttgaagtttaaaatagttaatattcaattaatcatgtgctaatggctcacctcgttttgcgtatctttccaatctccccaatccccttctcctcaaacacacccttagttcagctggaatgaaatattttacaatatatatatattttcaggctcaaattggtttatttcccgtggagtacgcgaagaattgcgcaaaagccatggtacaagcggttcggcaagggaagcgttgtctcaccgtgccaccatggttcagcacaatgtacctgtggagggtattcgcaccggaggtcgtcgagttctgctaccgcctcctgtacatgcaccgccatggtggtagccaagctgatgcgccgagcaagaagatggctgaggctggtggaaagaagctcttgtatccaacgtcgctgcgctctgatgacatcaaggatgagtgaatgcccagttcttctgagcatgaacttcagtatattcctctgaagaactctgcaggtctgaaccttccatgaaatgggccaaatagataaaatcttagtatgaactgtggctatgatcatggaaaaatatgtatgtgctactattctgtgtatgaataagttgtgttctaatagtgctgtgttcttaactggtatgaattatgcatcctatttaccactaaaaacgagttgctctggagtggtagatatgtgtgattcagaaggaaaagaaactgggagctgtgttcctaaggctataaaactaagagtaactgtggtaaggatgagtttattaaaaaaaataacctatttaaggtcccgttcctttttaagttaagacagatttttcattggttttcgttagggcaccttttaatcggataatgatacgaatcgggcgaccaggcgggggagcaaaaatcggccgctcccccgcccctgcccctgcatgccgctggacccatcacagtgcttgtccccacatgcaacaaattaaccacaatacatattttagaaactctgttaagggtatttggtttttttttccagcaaaaatatttcacttagtgtggtcataatgtttcactatgtatagatttaatgttacagtgaacgaaacattccattgcaacaaaaaaaacccacatattttggaaaccccctattaaggaaatttagtttatttttttatttcactaaaaaacctagtgtactcacaatgtttcactatgtatagatctaatgttacagtgaactgaaacattctttcgctatttgctgaaacattatttttatataaggtgaaacaacacccgatttaaatgagtgaaacattttcgatctacttagtgaaacaattccgacatacctggtggaacatcgtgcaacatttaaaaataattcaataataagctaaattttttttcgtcggaatatatccatatgtggtcttgttttgaagatttaattacaacgaatttaatggtgcaatcgaattatgatttggataagtaatttaagagaaaaatcagtttaaagtaattttgcacgtaaatagaatgacgtcagtgctcgattttaccactcccgatcgggcgcccgaccgagagtcgttccccttttaatctactaaaccatgtattttgagcgaaatttttataaacaagttacttaaattcatttttctaaatatgaaataattaaaacatgataatacgagattcttgtttggcgttcccttatttaatcattggtgactactaatagtgtaggattgcgcagcagaaactaaactaaccaaggggatgaatggtcgaagtacccaaaaaccaaaatttttagcgaaactaaaagttattctcaaatcgatgaagctcggtctcaccacaagtcttttgccggtctgaccacgtctgtgcaaccgatctgatcgagtcgcgttgcctcctcatgtcgtcgccgccactgatctgaccgtcgtgcactgaccgatgtgatcgtcgaactcgagcaaacacaaatcgatgatttattaaaatataatgaaactttattacctctattcgtgtttagaaagttccacaatagcactcctctcgaaaacctcgactaaactcaaaaccttaacttttctataaactcaagtctcacacaatcgataccggaagacctcatcctccctctttcaatatatacccaaggtagacagcctaaatacacaactcgaacttgcacaagaagtcccaacccctaggaaacaatctcttacaagaaataaacttgacaaactttaatcatatcgaatttggactttttccaaatttgactttgcatctacacaatatctccatcgtatatatgccataaggaattttcaccaatcatatgcattgatcattagccgaagcatcccgcataatatgctaatcgtccagttgtcatcttcttccaagttgaatccctatctatcaccagcaacgctgtcccaacgcatagactcacctacaaatgaataaacaacgaaaccatatctctgcaacttgactcaaaattagcatacagtagtattacatacatatagtatccatctataagtcataaacatgaattaatcaagagtatccaaataagcaacttgaaaccaaaactgacacagagccgctaggtcagaccgtcgggctagctagtccgactgcgcaacacatgctggcctgatcatgaccggaccaaacagtcaacaaaatcctgtccatcatctgaaaaaacacacatatctacaaaccactttgccaaataatatccaaatatcaaaagtaattatctcgcatgcctatcgatcaaacatactttcattttacaatttccccttaataaacatattagcaaacttatcaaaaatgttgttttggtgtttggaaaaataaaaacaaagaagtggtaaaaagcatcaagtgctcaaaatttcaaaaggaaatttgtctcacttttgaaaagaaagaaatgtccccacaacttaagatatgcacattttgtatcttttctcctccttttgaaaataatttcatcgatcattagcattatgatcatcaaagtttcgttatttaacttttgtagacgtaatctacccttcatccttcactgatttgcttggttatttctattcggtccaacaaatattagtagttattactgtaaaattgttgaatgagtgcaaatatcaagggcaataaaactctcattttacacctttcgatcgaagatgtgctgtttgtaggatcgaatagcaataactaagccaaccagggggtgaatggttgtgttacccgaaaaccgtaacttttagtggaattaaaagttaccctctaattcgatggtggtcgatctaatcggagttgatctgctagtctgatcgcgcctctgccgtcagtctgatcggtatagatcacccagtccaactgctagcgtctcctcctcctactgtcgccgccgccagtctaactgcaatggtgcaattcatgcactcactggtgtgaccaccgaaacccggagaaacacaaatggaagatgtccctaagtagattggaattttattacttctctcggtgcttacaaagtgcgacaacagtactcctcacaaaaatctcgactaaactcgaaagcctaacttttctctaaactccactctctcaaaaatgataccgggaggctacatcctttctctctctatttattcccgaggtaggcagcctaaacactacaccatgacctagtattcccttcattgcaactgccctagataagtgcattgaatggcaattcatctgccgggaaaactattcccggcacttaaaaactgccctataaagtcctgtagcaaaagagaattcccggcagataattttttcctggcaattaactgccctagaatcactagagtattcccggcagatagttgtatccgtggcaattaactgcccttgatgcttagagcatccctggcatatagcctgacagttagtagttttactggcacttggttgtttcaatcatggaccaaatcagtacgaatgggtccaatatacacaaattcagatcggtaccaaatcagcccacaaaatcagtacaaactccataggcattcaacacacattcagcaattcaataccccataggctttcaatgtgcattcaacaactcaggtttaacatactgactttaagttgcatcaaaaaaacatactgactttaagattccacaagatcaaaagtagttatatccaacacagcagagtgtgcaaacacttgcttcagtgtacatatatacgagtacattttcttagcattcatacaaaacaagtctatttaattagcaaaaattcccaagactcttgtatgatgatggtccaccgatgtgtagatgaaataattcaaccaacaagcgaccaccttcaacatgcaactcttcatgtccaggatagcatcagtagctctaacaaaaagctagccatttgtactctcctgttcaaccaatacaaattgttggccaaaagtaatgaaacggaaacaggcactgatcatctagaatagaactgtattcatcgcattatttacctcatttaagttgttgaagaagttgacatgactaagggatttacattgacttgttgtccatctcgagaattagcaagtaattcagtcaacttttccacttcctcaccaagtgactcaatttttctaatagcagttctaacaaaaatctagcaattctgtaaaacaacagaaaagtaaaagattgcgtctgagaagagggtgaaatggctttctcttttcatttgcattaacaattattccatttatacctgatctaacaggagaaacatatgttggatcaatagtaatgtttgtgccgccacctaaatcaggacattggtctacatattcaatttcattgtcaggttaaattgtgcctaggaaggtccatccatctcctatccaaagctgatattgacaatcaaatttcagaggccacttaaaattagtttgtttcagtggtgttttttgtgcgtgaagtacaagtactcaccagtgtgcccatgggaaaaagataaaaaacattgcacaagaaaaatataacatgaggatataacatttcagccttttagcacagtactcatggcaagcaggaggatactaacggttgtacatttgttgttcgggacttctgttcggtagatgctcagcaacgtacaccttggatgatatctaggttgattgcagcaaaatcggtagtggacgactaaactgcaccatagagccaaatagttcaaacttggaaatagattataatgtcacttaaaataaatatttgaccaaacaggctcaacatatactgtttctcacacatgtctagctcaacaatataactgaccaaacaggctcagagacaagattcctccacataaaaaaagttggtttgcacactgctgcatatgcaacattgacattgcaatgctatatatccaaagcctctaattatctatccctgatgatgaactctgcaattttttgtgagcaggacgataataataagtgtatcatggtactactaggaagaaaagtgacagactgacaatgcataggatctaactgtcacagccaagcaggtagataatctctcgttcgctattttctccttgtttattttgtccattcattcacttataatttaacacatgaaacaatccatacatacatgcatacattcactcatttcagaccaaacaaatcatggatctggtataacagggagattttttacctgaacaagtggatatccgtggtcattccttgatctcaatgcagagggtggtggtgaactggtgaagaaggaaaagggcagaaaagcatctgaggaggaagaagacgaggcggatgcgggtaggcagcatcggaggaggacggtggaggcggtagcaacggagaagtagaggaggaggacgaggagtggacgccggcgcatggagtcgagggtttcggaggtggaacggatggagtcgaggctttggtgcggaggcgaggggcgcaggaggaggaatcggtggccgcgtagaggagtggagctcgtcggggagagagtgcggctgcgggcctgcggcggcgatggggaggcgttgggcagcgacagcggaagccggcgggcggagtcgacggcggcgtgtgggtcgagtcggaggcgatggggaggcggcggaggaggtggggaagagggtggagtcaactgcagcgatgggaaggcgttgggcggaagaggagccgacagcggaagccggccggcggaatcgaaggagaagtagaggaggatggcgaggcgtggagtcggcgcagatggagcatgcgcggatctgtgggaggcgtcggggtcgggctcgccggaggaggggaggcgtcggggtggggctccggcggtggaggggaggcgtcagcaggaggaggacggcggcgcaggaagaggaggcgcacagatggggaatcacgatgaatttttgtgcgggaacaacacctccagcacttggcgctttgctgggcccaccaatatttttagccgctaaaaatttactcaaaatttgttttcccgtaacaaaattcccggcagattatgtgttatcttaaattatctatggcagatcaattgacatgttatactagtttatcaccggcacttaatttgctatcctattttttaattgccggcaaatgatatgatgtccaaaattatttccggcacttgatatattctcggcaaatagtttgccactaactttattttattgccggcagttaagtgccatgaatactatgttatggtgtagtgaaagttaaagaaccaaccttgtacaagaagtcctaatccccaagcaaacattcccgtacaagaaacaagctttacaaactccaattttaaaaaaattggactcgctccaaaatcaactccgcatcctttacgcacacaatatctccatcgtatgccatatagaatcttcaccaaccacgtgcattgatctttagtctaagtatcctaaacatgaattatccacagaaatcgaaagagttaaccctagaccgaaactgacacggagtcggccgggcagaccatgggcagaccggtttaaccgcacgccatactccggtctgaccggctaccacagcccggtctgaccggtataaacctgtcaacaccaatcctatttaacactagaaaatttcaatcatttacaaaactactttgtcaataatctccaaatattaaaaccgataatctcatatgctaattgttcatcacaaaataagaatcaaaccaccttctgaccgcacacattttttaaaagaatgcatgcctccaatatattttttgcatgtcagtccctggatgttcacccctccactactagagaactgatctttactcgcatgccaaaaatcacatttgtcccgttcgaataggaaccaggactaaagatcatttttagccacacttcaatactccctccgtcccacaatataaaggattttgagtttttgattgcaatgtttgaccactcgtcttattcaaattctttttgcaaatataaaaaacgtaaagttgtgcttaaagtactgtagataacaaagtaagtcacaaataaaataaataataatttcaaaaaattttaaataagacgagtggtcaaacgttgcaaacaaaaactcaaaatcccttatattatgagacggagggagtagctgttaggccatatcaggccccaaatatctttagtctcggttggtattaccaacccggataaaagatgtctcttgggttagtttaaaaagaaaacatctctatccaagttagatgtgtgtagtaggtgggatggtaccaatagggacaaaagatcctccatcttcagtccgggttagtatcaccaaccgggactaaaaatcgatctttagtcctggttggtgacaccaactcagactaaagatatttttagtcccggttgttgttaccaacccgactaaagatgcctccagggttagtttaacaagaaagaatctctatccaagctagatgtgtgtagtaggtgggatggtaatgtgcgtgagggctgaggtgagatcttgagtttgaatcccgcatcccacatatttttttttgacttggtatgcattttagtctcggttatttcaatggaattaaagatggacatctttagcctcggattgtacatcctggttgcataaccgggactacaaacggttgtgatatttcaacagaactaaagatggacatctgtagtcccagattatacgtcgcggttgtataattgggactaaagtccatttctccagccgtgctctcttcctctgttgctccctctgagtaaaaacatcccatcttgagtaaaagaaaaatactcatagttaaaccaattcctcgcctttaaatataggaattactcatctgtaaaatcgaagagaaataattactcatagataaatctaaaataaaaggaattactcttagttaaaatccaagagtaaaaaagttacttgtagtaaaatatagagtatttcttttataaattgttgaatctgagtaaaaaaaaactactcccggttttaagtgtgagtaaatattttactcttaaactccaaaaaagtaaatattttactcccagttttactatgagtaaatctattactcaattaggagaaagggatgagactagataaagagacaggaagaggagctaacggatcaaaacacagtaaacaatgagaggcgagcagttatttgcagaatggtgtggtgagatgaggtgcttgatctaaccagctatcttgaacagtgattggaatttccaaaggaaatttcggaaattcgccccccaccggcaagcagatatctcacctgaattttggtttgtttttcctttattttgaatttggtcaaattttattcaaaattcatgaaagtttcaaaaaatttcagcaaaaaagtactgaaattttcgaaatttcggttctgtcggccatgtcggccacccctggcaaaaatcacaatttcaagattgctaaccctgatcttgaatccaatgatacacaatggattgcatgattatactggaatggagggtttgcgcctaattactcctcgttgattaaaggttttctgctattaattatctttttttctcgagcacgaaggagacctacttcttgacatctcaagtataagattagcttacgagatatttctggaaaattgcacagtcagattagctatttggttcttccctaatctctatagtcaaataaaagtagcttgacataattcttattagcccaaagggtaaatcctgagataatacgcattaactaactactgtacttctgctaaccaaatttccctttatttcaacttttgcgtcctgtgatatcagcagatcgtggcatccgatttagctactaagcccaccagaaaccagttaagcctctgcagtatacattcttcctgaaaaacaagttgccttttttttttcttttttctatctggacaagtacagtagcgtctacgaaattggaaggcgacttcgaaatgacctcgtagatagttcagtggaaccagtcatatgtttacttgacttgctatggatacttttttgtttgactaatgatttcttgactctacgacgaccaacgtcaacatgttcagttgtctttccgttatgtttgtgtgcaggaaagtaaatcattgctactatgtatatgccgttatctttagataatcaaggggcagggctctagagtttgatcaggtctaatcactggtcctttcggttccacaataattaacattttagacaatcttattttgactatatttatttattactatatatataagaaataaatatatttttatttttgttattattaattgtagttgttactatatatataacaaatttatatgtgttgttctagtgcttttaaattaaatattttaaagccattaattgtcaaagttgtaaatgttcgacgtcaaacttttgcaaaacgtcaacaattacgaaacaagagagggttctgtacgtcatgtgtatagggatccgctactcaaggaagacgataacggcgagggagatcaatgacgaccacaggtcgggggagatggcggtagcgagtgaggtcgatgatggtgttgggggctctgctgggatggagtcggtgaatccgatgtaggtttttcaatatgtactccttgatcgattgagttgaatccaaatgtcagttcattgttatccattaattcttataatgggattcttggaatgggattgaaatagtgctcttgggatctgttcttgcgatcaggatgatatgtggattaattaggggtatggatctggggatgatctggggattaataattaggtgagcagacctccatttctttttactcgtgtaacacacaataaatgaaagttacatcctatattcgagccttatgtgtgttaagacactgaagcaatctatactatagatgcccactaactcctaaaccacaacatgaaaatgtgacacatcatcattcacgagtaattattatctaaagtattttaaatatcatataaagtttacaattttacaattttattatatttttagaactcaatatgcaagaaatgtcaaatcattatctccacatcatttttacgttatttaaacatatacaaactatcatttctataatatataacatgcatgcgtccacatatcacatagcgaagcgccaggtatcaactagttgaatgatcaaagttcacccctggatgttgttgggtgcccatcaaattcggtaatctagccatgtagtcacacagagttgtatgattttatgtcccacgtgcgttttcgattctaaatacgttcacacatttatcaaattgttcggcacaaagtttctgcttgtttatttcagcgtctttttggtgtgtttgaggagaaggggattgaggaggttggaaagatacgcaaaacgaggtgagctattagctcatgattaattgagtattaactattttaaattttaaaaatggattaatatgattttttaaagcaactttcatatagaaaatttttgcaaaaaacacaccgtttagtagtttgggaaacgtgcacgcggaaaacgaaacaaacaaactcactctctcaccctctcgaacgctgcctttgttatgtattgccttcattcaagaacaattttatttttaaggagactagagacagattagcaacaaacaaaaattagcccaataaccctatttaattctatttaatgatcacaccacatacatattgtatacttaaaagataaggttagaaatgaggataaaaagataagaggttagaaagcgatatactcgctccatactcgtaaaggaagtcgtttaggacaatgtttaagtcaaaccttgagaatataaataatgaataactctcaagttgttgagtttgaaaatgtaaaaattatatgaatatatttgtcttgaaaaatactttcataaaagtatacatatatcacatttcaataaatatttttatagaaacaaggagtcaaaattgtattttggagaccgtgtcgctgtcctaaacaacttccttcacgagtacggatagagtgcgttctcccctgctcatttcttcgaaccggttggcagcttagctttgccgcagaacatattgaataacagaatagttaagtttttttttccttatgtatgtacatgtaaataaaaactatattttaatatggagggagtttattgtactactctccatataccttctccatatcctaaaagactaatatgtcctatattgatgtggaaaatcaaacgagaataaggagaaaattagaaagaagagggaatactactggatcaaggattgaaatgagaataaaagaataagatagtatttaaaagctccagtggatccatctaaaaaataacgtgtccgttggatataaaatcctaaactaaaagcttaaaactacattattttaggaccgaggaatagtatatatctaactttatctcccgtttgttacaacgttgttggacggaaggaacgcatggccaagccctaattaagctagacccggccgatttgagactatatacatagaatagtaaaacttccggtcccggtgatgattattttaagacaatttcagaaacgaaaagggtcatacaacttgcaccggtcctttgctttccgtgcagtgcaatcactttgataaagctagcagtaagaatatagtaaatcggttggcttaacagcagtttttttttttgaaaagtcggtaaaatttaaacaaacgcgtatgtatccctatagtttctgcgccatttcgcaatgcacatctttcacacggcgtgcatgcatgcatatgcccctatacggccctataaatgcccttacatcggcaacagccccgatccaacaattcgagttcaaagtgtaagagggaaataagtagagtacgagagctcaaacaatggcgaagatcacgaagccgcaactcatgattccctttacaatccttatgctcctcatggccgtacaaggtaatagcagttaacaaaatcccatttcaatcactttcaatgttactccctccgtactaaattatacgacaccattaaattttcacatcacgtttgactactcgtctgattcaaaaatttagtataaatattatttattttgttgtgatttgtttgtcatcaagaatattcaggggcggatctacagtataatcatcggtgtcaggcgacaccgacgactttcggcaaaacctatagtaaaactgcttatccatatactataacatcatgttctaagcataattagcatactattacaccgatagacacgttatgacaccaacgaaccaattttctggatccgccactgagaatactataatcataacctctacttttacatatttatgttaaacttttgaataagatgaatggttaaaatgctatacgaaaaatcaacgacgtgtattttaagatggagctagtagagtttatttctatggaggttataagccggtcatgatgtcaatcgccgtacgtcgtataggggccgagtcccagcggtgcaccccatcgagcatcgacatccagcagactaacaccgggaagaaggtcggcgcgctcgacacgatgttccaagtgtcggtgactaacaggtgcacgtgcacggtgaggaccgtcttcctcagggccgacggtttcacgagcgcggtggccgttgaccccaagctgttccgacaggcggggtctgccggctacctcgtcggcgatggccggcgcatcccgagcgccaaatcggtcacgtttcaatacgcttgggaccactacttcaagatgactcccgctagcattcaggctgaatgctagattagggcatacacatattcttcatcattggaacattgttgcttttagctagtctcatatatatatttgtctttgagggtgctatttattatatatggtggtgcatgctcattgctacattcggtttagaggaataatatatagcgtcgtgtcgtaaggccacttagtatgtaatctttgctgtatgtgttgcattaaagaaaacaaaaaaagctgcgcttgtacaggcagcaccaaaatctccaagtcgcctgctctgtttttccccctggtatactttataaaataataattaacttatgtacgtacaagccctataataaaatgaagggccaagtgctagtatatttgtttcggagattttcgaaaatatttttgatatataatgtttgttaaagcagttttcttaataaactgatttaattcgaataatatagtggagttcacgatcagcaatgttgtactatgacgaaatccttacctgcagaagagaagttccatactaattacggtcttttcagaaaagtatctacgaaacgccatctgtttataaattccttgtttcctcgttctcctcgtgcgatgttcttcccacatgtagttaacagcgacacgcacgaagtacgctttctttactggaaaaataaaagatcgtgccactacactcgtattcgtatggtactactgcctacatactctctttatcccaaaataaataaatttaaaataggatataatattttatagaacagcgaacgtagaaatatctctgtatagatccgttatattagaaaaaatacgacatctgatttttagattggtttattctaagacggaagaagtacaggcctatgtgcccctgtcatagaaaaaacaaatttctggttattccatatttggacaagctcatgtccatttttttttaagtcagaagtttcttctggaagtaagctctcactaacaaattaattagcatgatgagtcattgtgcttgtcgtgtgtagccgtacgtgcttcacactgtcgatgtttatcgaaatgatgtcaggattgctatatatatagtcgcttgaggagattgagagtaataatacctttgtgaagatcttaattgatgcccctaggccttttgacatattgcatatataatacaggagtaattaactaattttgttatggacgttatgctgaacatgttcggccactcggcttccactaagtggtggaaatgattgtttgttgtttatcaagtatccccacttaacatggtttagggaaaatctgatatagagatttatttttgttttttcaaccttttcacattagaaaaatcaatttctcctaacggccaaaatagattattttttgtatgtggacctccgccccatatgcctggaggtgtctgcaaaatttgctatgtttgcgtgcggtggtgcacccacacgtgcttatgtcatctgcatgcaaaaataaaaatcacaaaaaaataaaaattcaaaaatcacgaaaccctaaccctagaagccgccaccgccgccatctacaacgtggccgtcgttgctcgaatccgctgccaccatcctcatcctggtcggcgcatagggccatcgggatccgtgcgagagaggaagggggcaccaagtccgctgctcatcatcgttgtcgtcgccacgcgagaggggtagttggatctaccatcgtcgtggcgtctcccacccaccaccaccgaatctgcctcccctaacaccgctgccgctggatccacctctctcgaggccaaccggcggtagatccacaagggaggcggagaggctcactcagtcgccgtcgccaccattgctaaacttaactgctgccgccgctcctccgccaccaccgctgtgagagagagggagagagagggctaggtgttgacgctttttcgtggccaacacaagatcacctaacgatttacggtgtaatcaacggagtcgccaaaattgatagatcaaaatcagctagcagagccgatttcgagatcaattcactttcgcggaatcacacgactaatttacaagcaaattaccaaagaagataaatatcgtacttacgtgacgacgaacgactagtttccgagcaaactagcaaaggataaccttctcgctttcgtggagaagcatgaccgtttttcagcgcaaaatggcaaagattaactaaattctagggttgttagaactcagccatgaaaacgagatagaaaagaacataaaggtaaaaaagatgaatggtagaatgaaattgttcagggtttcttctaatctgccgtcaccagtatatatactggttactctaatcgatctttaacaatcctaattggtcccataaaagtatggaaaagtttaatcggaaagggaaacaaactaaccggctgatctgtttctatctatcttgccgcagcacgcgctaaccggcttcatcggctctaacaagccacgccagcatcagcagccggcctgatcaccacatccatccatccacttgcctctgtctaatcaccgtcctgaacatggctaagaggtctcctgcagtacagcttccacaccatcgagcagcaagctaacaccttgcattccttccagttaacagctcaaaccaaccatcaagcaacagctccatgtacataatctccaactgggttaaataccacagtcaccaagtaactcacagatttaatcttccaatgcaccaaatatttctgcacatataaaatgtggtaatcttataattaaaccactaaccaatcacaccaactattctccataatttggcctgcctaaatgcactaactataagccaaattatcgtacaaacactgggaaagagcagaaatgagtggtagagccggaggacatgggggagagagagagaatggaggagaaaacatgataaggttgagtggccgggtaaattttttaagatggacggaggtcggctggactttttgcaggcatgattcttaacagaaccgcatgcaaaaataggtttattttcgcatgacatctctattaagaagacgttgcgaaaatacgggtcgatttttgcaaacgcgaccaaatacggtccacctgcaaactaaacggttttttgtctagaaaaattgttttttataatgtcaataataaacccttctaaaacttatttccaaatttggatggtcatgccacaattttggatgtaagagtttttgggtttgtatgtttttaaaattaaaaactaaagtgttcatcgaataaaaaattcaaatctaaatgggatactatacacgtcagttttgcgttttttagatgatgatatggcagttgtgtaatactgccaaataataagtacatgtagttaatttcacaataaaataaatgacacctacggctatatgaatatatgtggatgatgtgacagtgtgttaaatttttttggcaaaaaattgctcctggaatcttaaaaatttgtggtgtttcctctagaattgaggatcaacttaaaacaggacagtttagctattggtattttgcaagaagaaaacacaataaccgttattttagtatgtcgtcttgggatattacattgtaaaatattagcacacacacaactagtcaaacttgactccgaatagcactccaggcaaaaatgcaaaatgcaaacatatatatatgacgcattacaacaataatttaactgacaatataaattgatattatatagtgatcatatgtcataaacagcagttattatactttgtataagaattcaaaaataaaaatgattctattttatttatagtactaatatttcttctgttacttcaatttgatagttttacaattcaaaattagaaagtactgatctgcactcatgctggagtaacaacatatttagtatttggtgtaatataacttagaaacttggaacaattgtgaataatttgtaaagttaaatttaatcatataagtcgctgaataaaattaaatttaatcatatatgttggttgaatgtttttttctcgaaaatccgtgtaaatgatggcattatgagaattgaaaaactaattagttgaacttaatattcaacttctaaatcacttatatcattgtcacaaatcttaaaaacagcagtatatattaaaccattgtgcaagatattaaataataaaaatattattttgaaattccaatggaattgatggtatttatattttcattgttgggtccacacatcattatattattttcattttttgttttaaggaaagtgtttaaatatttctgacgttgatcaaaactcgtcacaacagttgaattttcccgataggagactttacgtcaagaaaattaatggccgttagggctagccgtgtttctggtagtgagttgagctccgctcttttacggtgctccctctttctcatttttgttgtactttccataaaataatagtaaaataaaatttcactttttttctgaaaagaggaaagttcaccgtattaagtacagttcatatgaatatccggcttccgatcaacacgatcccaatcgtagcaccccatcttatctggttatcaaccgtgctgaaacttgattgacctcgccaagaggactaatccgtacgtgtgaatccaagaacacaagaaagaacaagaagacaacaactcaattgcagatgaatgtttaatgaagaactcgaagttggggttccacaaactgaactagcggcgaaactataatggcggaaataatctaagtaaaatccaaccctaaattaacaacagctattgaatatataggttatagggtcgaccttggacccctgaactgagtccctatcggactctgacatgatacttgtccaatagtccaaagatgatggcgcagcacccggacagattctagaccctttcttgttttgactattctcgtcagcttggaaggaattttgacgtgagaccatattcattttaaatgtgatctcattagctttcatacatatgtagaacgttgaaatcggagtccgaatacaatattctaggcaatgattttagtatggactggtcctggagcccgagatggacttgaacttgatatgagttggttatccatcttggttgaacacccatgacgaccttatgcaggggtggagttagagcgaaacagagggtggtgccacttgcttaatttactctatttttgatccagtttaagctgatacgggtgcctaaatttgtattgagggggtgcatacatggtcaaaatagatgagatatagctcatagcgcgcctcttttcaagtgttacatggtcctctcaataattcctaatcataattaaaatattaggtagtaatctattcttaaaatcaatatcacataaagaaataaatacggacgacttcacctgtaatttcaattgtcggacacgagctataatgattggacgttgtatagcaacttgagtattgtgtgtatacaaaggagaacggaggaatgccatgtttaagatgacacggaattaactgaaacatgtataaacagttcgccagtacagcgtgggagatgagtaatcaagcccattggttttgatcggtaaattgttcctatgcatcgcatcgcatcgcgcaagtcggccgggtccacctctgtcgaaacaagaattcggcaataataaaaggggtagcgcacgagacctaaaagtggatagatacggagacaaggatttagacaggttcagaccctctcgatgagaggtaataccctactcctgtttggggatttgaatccgccgggtgtattatagatctgacgatctagttgtgttttgtgccccctagagggcctcttgcccaccttatataggatgggaggcaggattacaagatagaaaccttaaccaatacggtatcggttttcctaaatctactttacaatattatcaaactaggactttaggccgtttgataatatataaggaaacgtaatacccaagtcatgatccgttacatatttcatagatataagttatcccctataaccagtcggataaccatgccgtatgggtatggggtacccataatctccacagtaggccctgagaccttcacagtcgaaaagataatcttctctcgaactagattactccgaagccgagtgcttcaatcatctttgctatgatcccccgagtacttttaccaaatctgaacactgtggagggctgaaaaaaaatatttgtaaacttaggtgcatcgactagatgcacctaataggtgtagcccccgactatatggttagttgagcaaactgaacatatagtgaaggagtaaataatctaatcaactgaatggtttttgataattatagtcaactaagtgacttgatagcatatgcggtgtgaatccccgaataacatgatccaagtgatataccgactactttgtaaaatatgacgtgcaacctaaagttgacttcatcattgaaaatccacgtagcaaaatagctataaagaagcttgtatgttgggaataaaaaaatttctaaagtattgggcacacaccatgtgcacactgctttaatagaagtgcttaaatccctaaaagacacacggtttcaccacacctggaaatttatggcatatgtggtgtaacatccgagtaaataaactcataaaggatttaccaaccgcctggaaagagaccacaatatataatcagcctaagctataatattggtcaataaaagtgcacacttatgtagcaaaaatcaatgatattgtatccaatcaattgcttaaaaacccaaacagcaccttgacttatataaaaatgtcagcggggcagttatataaaactttactgtttgacaccttttaagatgcattgtaccaactcctaaaaagttgagtaactgcggtataaaaggaaggtattgggcacttgatcatgcgcactttggcctaagcaaaaagtgcctaagtccctaaaagaacatgacaggccacacctgaaaatatgggttgcagacatattaggcctaggccaaaaactatgccttcgacaccctttaaaagatgacgcatgtaacatgctcccgagtaataaatcttccgagtgatatagacaagtgtagctcatatgaatagcttctgatctgagtgattatcccttatggatactccaaaatagatataaaaattgaatcccgactggcgcaagtattcggttgatagcccttacggggaataatgattagtccagtcttcgagcatagaaaatagtctcaggactacgagtgcatgttgcttgtatctagaataaaatccaacttgaaggtatgatccttgtgtttgagttgataagcccctgagcatatatagcttgtccttccatcaaagctgacgaagatgtaggtggtggtaaagataagagagaatccattatatgtcactgactttgtcacacgtctataatttatcactgactttgtcacattctacaatatgccatcgacctttgcttaacttttacgatttaccatcgtcgtccgattagcctccgttcgcactgttcatttttgtccaaatgaccaaaatacccctagaacaaaaatttccgaaatttggataaaattatcaaaatatcatattattaacataagcttgtaagcatccaaaatttggccaaaaacttaaaatctgacatttcagaatttttgtcccaggggtattttggtcattttgacaaatttgtacagcactaacaaagactatccggacagcgatggtaaatcgtagaagttaagcaaaagtcgatggcatattgtagaacgtgataaagttagtggcaaatcgtagacgtgtgataaagtcagtggcatataatagattatctctaaagataatgacaccattcaaatgtaatgaagtcgcatatccatagaggcgaagaaaccagtcggcgacagacaagtcagccagcagtgaagacgaaggcacccagtaacggcgacagagttgtgcagccatgacagtgaaataatcagtcgataacagatgaggcacccggtgaagaaaacgaagatgcccatcagtagaggcataataagccagccgtgaaagcgaagacaccatgggcggcggcagaggcaagccagtggtgaagacatagacgctcatcaatggcaatggcgaaatccattaatcatgaagatgaagaaaatagtcggcgacggcaaacgcaaccgacggtaatgacgattagcagcaacagacatgatcgactatgatgatgaagttgcccatcgatagcagtagagtaggctgtgttgaagaggccattagcaacagcggagatgttagggccgatgaagcagtgttatagctgttgtagatgcttcacttggaggaaagtagatgctgttgtccaactcatctaaactgagctgattggttgataactccaaactcccgaacatgtagattaaatcttgaacttgatactttgagaaatttggagtagattatggtagcatccagaaaccaaaattgccggtgaaataattggagtggctgaagtagaatgtctgctccgaagcaaagatgaagataatgactcctggagttgactcgttggctgattaattgatttcttcaacttgtcgaattttgagtcttgtatttgtgtagcccccgactctttggttagttgggaaacaactgaacatagagtcgagaactgtagcttcttgtcgtcgagtactcattgcttgcgtgaagatacatgttgaagatgtccgagtagaaatattgaagattggaaaaccacttgttgtaataatatagcatggcatcatagttgataacgcatgtcgagatgtcgaggctcttgtagacgtcgtggttagtaaagtggcaaatcttgcgaagtagaggcaatagagtttgccggtgcagaagacaatgaagataaagtcgctccaccatggtgacaaagttgcatagccgtgatgaagtgaagacaccattggcggcggcgaagccaacaggcaatgacgattacgccagtcaatgatgatgaagacgcgcagctgtggaggcgaacaaaccagtcggcatcagacaaggcggccaacaatgaagacgatgacgtccatcagtagtggtagcggtataaaccagccgtagaggcgagggcactagtcagctgcagacgagatgaccggcggtgaagacgataaggccaatcaacactagcagaatcatgcagccatggaagtgatgaaaccaatcgacagcagacgtagacagcttgcgttgaagatgatgacgcctattagcggcgacggcgacgtggccagctgtgaagacaatagctccagttggtgtcatacgaggcggccggtcggtgaagatgtagatgcccaacaacgacggcatgataggccagccgtgcaagcggagacaccagtcggcggcagacgaggcggccggtcggtaaagacgttaacgcctatcaacggcggcataataggtcagccgtgcaggcggagacaccattcggcggcagacgaggcggccggtcggtaaagacgtagacgcctaacaacggtggtataataggccagccgtgcaggcggagacaccagtcggcggcggcgatgacaagccgatcggtaaagatgtagacgcccatcaacggcggcataataggccagccgtgcaggcggaaacaccagtcggcggcgacggaggcgagccggcggtgaagacgtagatgcccatcaacggcggcataataggccagccgtgcaggcggagacaccagtcgatggcggggaaggcaagccggcggtgaagacgtagacgcccaacaacagcggcataataggccagccgtgcaggcgaagacaccagtcggcagcggcgaaggcaagccggtcggtaaagacgtagatgcccaacaacggtggcataataggacagccgtgcaggcgaaggcaccagtcggcggcggcgaaggcaagccggtcggtgaagacgtagacgcccaacaacggtggtgtaaccaaccaaccgtataggcgaagacaccagtctacggcggacgaggcgaccgatcggtgaagacgatgacgcccaacaacggtggtgtgaccacccaatcgtataggcgaggacaccagtcggcggcgacgacaacaagccgatggtgatgttttgattgatacattcctgaagcataggagataagcttaaagccatgaatccctattatgcatatctggatctggatcctagagaacaaatatatagaatgagtagtatctgatgtaaatataatactcgagaaaaattcaagtattttaaaatatttataaatatgtatttctcttcttgtcaattttgatttccccgagcagatgactccgtacgtttaaacactctgtccgactagtcatagcctccaagcatcgggagtcggcctaggcacttcctaaacatgcatatgagtgacatgagtttgtcattaatggaacaaggtttcacgaatcagaattttctactcgggtacttttgcaattgtaaagagcagaaaataaacttatcttatctttatgcttttgatttattccgaataatacttagtaccttgtgttactcggttcatccaacgagcccctaggtgctaggaatcggcccaaaagcaactatccatcgacaaaccaaacggaaagcataggaagatagaactccataattcgataggcatttttgtactcagattatgtcgcaagcaatcaagataaatattatgaaaattatttaaaaaatatgatataacatctgtagcccctgactcactagtcaacggcgaaccagttgatgtagtgaggcagaagaaaagaaaaatatcatataaaaaagaaaattaatgatgacttagctttctggtctttcccttggtgacagccgaggtggccgatgtgggaacaaagtcgtccatcaatggcaatgaaaacatcagccatagaagcagcttgagtcgactaaggatgaaagtgaagacgcccatgaacagtggcataataggccagctgtctaggcagaaacaccagtcggcgacaacgaaggcgagccagcggtgaagatgtagacgcccattgtcacgatcggaaataacccaacgggcattccttacatgcgtgtattattccttgtcccaggaggcaaggtacaccaaaagttgatacatttcagagtttatcaagcggaagcgtaaatagttactttattacatgggcggcgaaggcccagcacacaagaagacaaacgaaaaacagcggaagactagggcgacgaccacaggcgcttgacggcaggcacgagctagacaccaaagccttcatcatccaggggctcctcttctgggtttgggaaaaattgagcaagactgagtacaaccaccgtactcaacaagacacacccacaagtgcagaataaatgcaagggagtacaagggggttataatataaggggttagggtttgcagtaaacagcattaaaagacacttagttgctcaaagctattttgtaaatatggtcctagagctatacaatattattaatcaaggccgtgaacccacacgaacctgccttaacccaaggcctacgatgattcagaccgaactagcaacccgaccctgggtcctagctcgtcccaagccaatccaggccaaccattccacattttagtttttaagaaggttttaagaattaaaaaactaacttgggtacattgctcggcttgcccataaccgagggcgcggctattcgaataggttatactctgatcagaggtgtacatctttacccacaagacacatcttcctcacgtgtaaccacgtgccacataccaccacggtatacggacggaagacgtgacatagtttccaacccatcctagccatagacaagagtaccgacccaaccccacctacggcggaaacctccgggcaggtaggcaggactgagcccctagcagcaggacaccggccctgtgccatgacatcttgactaccgggccgcagctcatgtagccttcatttgccctagagatgtccatcgacccccgacttcgtccatctccatccgtgtacttttgtttataaccagactgagccacaaactaagccttacccactagacatgtggaagtacggtagtgctttgcaacagaggcccgaagaccggtccttatatggccgaggtgctactatcaaaaccatgcaccccgagcccagcctaaaaccattttgagggttttgaatagagggggaggtgtgaatccaattccacaataatccaaccattccatagtgtccaggtgatatgaatattcccaaagtctagagttgtaaaaccacctaatgttatgtcacgccccgaactagtcccgaccggaactagcccgtgacgctccaaattaacctgttaatcgataccagtcccaggaaacagtgctggtatcacagggagacagaatatcacagcaacagaggtctctttattatagagtagaggtacagtcatgttgagctgcggacagatcccgagctcacaactgcgatacaaaagggaaacggaagccaggacttggaccaaacaacacaggcgcgacttgggaactaggccgaaaccctaaaactcatcgtagccgacttgctcctggaagaactcctcaacagcaggatccgcttcatcttcttcagcaactgggggggattatttatatagagcaagggtgagtacgggagtactcagcaagccatgggaaataagtgtttaatgcaggcttcaaagaaaggctgttgtttttgcaattgattttatttgaacccttttctaaaaacaactaggtgagtgcttctcaaacgacacagatgagacagtgcgtctcgtccggtcggagtatgtgcaatgtatcagtctttagaattgtaacaaggttggcacctggccaacagcttttcaaacagccacccgggccaacaactctcaaacggccactcgagcctagctgatcccatcagctgcagatttttcaaacatcgaacccctttccacaacagcaatttcacaagcagtagtcaaacaaaactacgctaggaatcacctcacatccgcccatgaccgtgggcacggctgttcgaatagtttgttaacctctgcagagggggtacactttacccacacgacattactaacccggatcacctagcccgtggggatcagccacttcgggagacctccaagctttcatgacaaggcatttccaaagccgacacaggtttaccatatgccgacgagaggggtcccagaccaacaacaggttaggtcctagaccatactgtgccaggaagcccaggggtcctccccgacaccaccccggtgaatccacatgtcgctcggcatcaaggctcccctgataagctagttactcagccaggggtgtcccattccacccatgtggtcgtacttgacttatgtttggatgaaattccaaggaaacggtccttaagtgcgagagcgggaaatcgtacacccggtacgttccccggttcgcggtgttggaaattcatttagttcgcaagcaccgacccaggtgtcgggttttccaagtcttttgtaaaacccaagttttacccatgaagtttttcagattttaagtttgaaggcgtccgtcgatactcgcaccgggtgcacgaatatcgagacgcaactagatggttacaaggggacatgatataacaattaacaaaggaaggatcaaatgcaacaaattaggtaggtccgccaatctgccttacagacgggacaacagattaagtgcgatcctatcaatgcataatatttctcaagcaacataattaaatttcaaatataggttcaagatgttcaaaggtggcttgccttgctcgagatctggagcttgatcctcgaaatcctcgcactgcgggtcttcgggctccgaaactacacgcgaaacgggacaactcaacaaacggcgaaaataaagccctattaaagacctctaagtgtgctattaggtagatctcgagatttgaggaattttggaagttgaacggagtcaaacggatttacggttgggaagatattgaatttctaagattattggatttttggtctaaaggaaaaggatttaattaaatcctttttggaaaagaaaagaaaagaaaagaaaagagggagggaatatagacttttctagggcggctagggcgcagcccaagggaaatggagcggtccggccgagctaaatgggctggccggcccaaggcggcccaaggcggcccaagacgcgcgcgcgcgggagtggaggagggagagagcgccggtagaccgggctcgccacgcgtggtcccgggtgggacccgcttgtcggtgacacgattcaccgtgcggagcgagcacgtggcgcacgcgcgcgggcgggggagggacgcggtgcacgcgcgtggttcgcggtggaaaggatgcggcgggcccacgcgcagcctcacggctcgcggtggaacgcgcgcacgggaggggctgaccggggttggcccgacccgatctcggccgagctgacgccgacgtggcgcctacgtggcgcctacgtggctgccacgcgggctggcgggaggaagacgaaggcgccggccgcgaatggacggcgggcggcggcggtttctccggggcgccttgtgacgatgaggggcgacggggcgtacactgggatgacgaggaagaaggagagggagcgagccaacggctcggatttgccggagggagtccgtcggcggcggatttcggcggcggcaaccggcggagggcaaagggggaagcagtgacgaggtcacaaggggccaattcccggcggtgagagcatctacacggccacgggaatccgttgctagcgtcggattgggcggagctacgccgagcaaggccggcgacgagcgggtgctacggagctcgggcggcgacggcggcgagcacacggcgagcgacggcaacggtcgaggcggcgccggctagctacggggaagctactcgagctactaccgaaaactaagggggagagatggagcgaggaggaagaacggagggaggcactaccgagatgaggagagcgatgtgacgagaggccgacggcgcgggagtaatctctccggcctcgggccggggaagaggaggaagacgagcgcccggagtccccttccgcgtccacgaacgcaccggctctcccggcgcttggcgatgaacggtggaggcgagacagagctcggaaggcggcggcaacaatggcgatgggaggaggagagagggagggcgcctgggctttaagggcggcaatgtcggtttggaatcgacttgggcggtcaaggcgcgaactggcgctcggcgctcgcgtccaatcggcgacagggcggagggaagatgacgccggcgggaggaaaaggggaaaaggagggagggaaagggggctcgcccctttcttctttgggaaaaggaggaggggagcgggggcgacgtggctgagggaggagggctctgcctccgtcccttggcggcttgcgcgcggagtgacggggctgaggcgatgatgacggcgatgacggcggggcggtgtggagcggagcggcgacacgggcgacaggcgcgtgcagaggctgacggcggcggcgaccgggcggtcggccactcggcacgcgcgcgcggcttgcaacgggaggcgcggcggatggagtggcgcggctcgggcacgcgtgctggctgcagggccgagcggctgcaggcgcggcagggcagcggggccgggcagtgcagacgcgacgcggcgatgatgacgcgggtgcgcgcgcgaacgacgcgcggggagcggcagcgagggagcggagaggagggctcggctcggcgcgggcggctcacgcgcacgcgcgcgggcagagcggagggggagggaggcgctcggcgcggcggctcacgcacgcgcgggtagagcggagggagcggaggaggggagctcggcgcagctcacgcgctcgcgcgtgcagcgcgcgggcggagcggagcggagggagcgagagcgagagagatagggagagagagcgccgggagggagggggagatgggccgggggggagagggggagatgggccgagagaaattcggcccatcgaccccgggggaggcaaaatagacttttgcggaggaatttgatttggaaggatttggattcgggattgaactcgacgatagatcggggatttgagatcttgagatggcacggacactagacaacaagcaaagaaacaaatttcgcaattagggttttttaagagataattttcccgctaggcgccacgacggaacgggcgctacggaccaacccccctaacaagaatctcgaccctgagattcagcacctaagggagcagctccgggaactcggcgcggagaagatcttctcgctcccaggttgcctcatcttcagaatggttgctccattggactttgtagaacttgatggtcttccttcgagtctgacgttctgcctcttcaagaaccttgatcggtctttccttgtaggtcagattcttttccagctcgatattacccaggggaacttgttcttctggaactcgaagacatttctttaactgggatacgtggaacacgttgtgcacatctacgagaccttcaggcggttatgaggtaagggccgatgtagcggggtgctaacttgccggacatcccaaaccttctcataccacggaggggtgatacccgcaggtacacatgatctcccttttcgaactcaaggtcatgcctccgattgtcagcgtaattcttctgacggttctgcgctgtctttaaacgttctcggattagcttaacttgttcttctgctgacttgagtatgtcaggaccgaataccagcgcttcgcccacctcattccagcacaagggagtgcggcactttcttccgaacattgcctcattcggcgacatctgaatgctggcctgataactattgttgtatgagaactcagcatacggcaaacaacgatcccaagtgccttcgaaatccagggcacacgcacgtagcatgtcttctaggatttggtttaccctttctgtctgaccatcggtctgcggatggtaggccgtactaaaatttagatcgattccgagggcttcatgcaactgcttccagaaccttgaggtgaactgagtccctcggtctgacacaatcttcttgggacagccaaatctacatacgacatgggtcatgtagagttctgctagttcctttccatcaaaggtggttttcactggcatgaaatgagctgatttcgtgagtcggtccacgattacccagatggagtcgtacccgctaggggttcttggcaaaccggtgatgaaatccattccgatctcttcccatttcctctcgggaatcggtaggggttgcagcagaccagctggcctctgatgttctgccttgactctttggcaaatgtcacacaaggctacgtattctgtgacatctcgcttcattccagcccaccagaagtatgccttgatatcttggtacatcttcgtacttcctggatgaatggagtaggcggactcatgagcttcctttaggatgagatctcttaactccttcttggccggtacacagatgcgtggaccgcaccaaactgtgccttgatcgtctatggagaaattggtgtctttcttctcctgtattctttttattaactcttttatcccttcgtcatctttctgagcctcccgaatttgcgattctagggtaggctgtactgtcaagctagcagggacacctgactgtaccacggtcagccttaacttctccatttatctgcacaggcgatcttggtcaggccgtatttgagctacattgcaataggccttgcgacttagcgcatcagcgaccacgttagctttaccggggtggtaatggattccaagatcgtaatccttgattagttccagccatcttctctgcctcatatttaactcggtctgagtgaagatatacttaagacttttgtgatcggtgtatacttcacatctattcccgattaaatagtgcctccagatcttaagagcatgaaccacggctgccaactcgagatcatgggtaggataattgacttcatgaggcctgagctgccgggatgcataggccacaacctttcgttcttgcattaggacacatcctaagccttgtcttgatgcatcacagaagatctcgaaatcttttcggatatctggcaaggtgagaactggggcagtggtcaaccttcatttcttgaaagctgtcttcacaggctgcagaccattcaaatttcttttccttctttaacagctcggtcataggtctggctagtttagagaatccttcaatgaatcttcgataatatccagctaagccaaggaagctgcgaatctctgacacattcttgggcgggttccaagcaagtacagcctcaaccttgctgggatctacttcgacaccgttggaggagatcacgtgtccaagaaatgctactcggtctaaccagaattcgcatttcgagaattttgcgaatagttgaggatttctgagcttttccattatcagcctcagatgttcagcatgttcttcctcgttccttgagtatatcaggatgtcatcgatgaacaccacgacaaactggtccaggtattccatgaagattttgttcattaagttcatgaagaatgctggagcattggtgagtccgaaggacatcactgtgaactcatatagaccataacgcgttgagaaagcggtcttcgggatatcttcagatctgatttttagttggtggtaacctgatctcaagtcaatctttgagaaaactcttgctcctttaagttgatcgaacaaatcgtcaatccgtggcaacgggtacttgttctttatagttacttcattcagggctctatagtcgattaccattctctcagagccatcctttttcttaaccagaagcactggggctccccaaggggatgagctaggtcgcacataacctttactctccaactcttcgatttgtcttttaacttctgctaactcattagctgccattcggtatggtctttttgcaattggtgcagtgcctggtgccagttctatggcgaactcaatctctcggtctggtggcatactcgttaattcttccggaaatacgtcgggatattcacagactatgggcaccgactccaaggaggtgacttgaaaacaggttaggagagaccgacttgcggtaggggtgttagaggtaaagcggacttgctttcctccaggtccttgcaaggtgatggacttttcggcacaatctatctgtcctttctgcttggccaaccaatccatccctaggatgatgtccaagctttgcgagtctaggactatcggtttggctaggaagtcaacttcctcaattctaaggttaacttccgggcatatttgagttgcccttatattccttccaggggaatgtactatcattggtacacgcaaattttgggttttccaaccatttattttcacaaaagcttgtgatatgaaagaatgggaagctcctgaatcaaacagaactattgcgggtacggagttgacagagaacatacccatcacaacgtctgaagcatcctgggcggtctcaacttgaatgcggttcacccggcctcgaccaaggttgttggaagcacgtgaaccttgtccacttgcctgagagctaggacgagactgagctgccgctggagtaggagttctggcagtgctgccattagcatgccctgagttggtgttggtaggattctgagggcactgtctggcatagtgacccatctggttgcaccggaaacactgaactgctgatggtccctgcggtgacttgaaagaggtaacactgtttggcgcagtattgccactaggggcacactgctgtggctgaggtgccggacggttcatctgagggcgaggggcatagcctggctggcggttagcctgagtgaccgactggtggtattgcatgggttgaccgtagcgagggcgaggtacgcctcgggaaggatttccctgatggttagacttgcgtttcttgtattcttcggtggcctcttttctggcatcctcaagtagaagtgccttgttgatcatatgttgaaaagtggggaaatcatgagcaagcaactggagtctcattccaactgcgatccctttcaagaatttcctgatcttcttcttgtctgtgtctacttcctcaggggcgtaccgagccaacttgttgaacatacttaggtactcattgacactgctgttgccttgcttaagtttgttgaattcctctttcttcatgtcaatagtgctttcaggcacatgagctgcacggaaagccgtagcaaactcatcccaagcaatgttagtgggttcagggtgtgcattgcagtaattctcccaccaatctgcagcaggtcctcttagctggtgagaggcgtagagcgtcttctcaataggagtgcactgtactaagttgagttttctatcaacatctttcagaaaatcgtcagtctcgacgggctcgacggtctgagagaactctggcggacgagacctcagaaaatctatcaacttggatctattgttgctcatgtgagggtggccatttccatgcgcattatgctgaaaaccggctacagctgcgactaatccttgccagatttgtgtctgaactgccattaagtgcttcatgttgttttccacatgaggtggggaagggaggcgttcttctccagaattgtgactggcagagcggtgagagcggtgagactgttccatctctgcatcacgggaagctgtgcgatgcgagcggtcgctacggcggggttgctcaacttctgcgttgcgggaagcagtacggtgcgaacggttgctgtgttgagactgctcattggctgactcatgattttcttctggctcgactctaccatcttcaaaaccaaagtgggctggtgcacgagctgcacggcgggggcggctagccatctaaactcccagaagagggcggaggaagagtcagataagcacttaggagggcaaggagcaaagtaaatagcaactcagatagcacacactaggcataaactagatttttcaaatcataaaaacacctaatacaacgggtgtggacaagtcacagagctacgccgagcttgactgtgcgcacaacacctaggagaaccaggctaccgaacaacacccacaacaacacacgcacgcactacctcgccacgactccaaaagagttggcggcggaacaaaagggcctaacacacggacgacagctgaagactgcctcctctactcctcgtcggcctggctgcctcctgtagtcggctcctcagtcgaagagacgtcgatcggctgacgcgaagggaccggcggaacctgtcgagggccggcatgtcacgcccggaatttctatccaaaattccaaacgcttacatgtgtgctaaaccctcgtctaggaatcaaccgaggcacacaataacaaaattgataatagagtacaaataattaactatttaatattcgcaaataaataattactacagaggtagatagttcccctcaaaaaaaaaaaaaaccttctacgcagcggaaaaaaaaactataacaaactacggaacagctatgacgactccactccacaggcttcttaaccagaacaagcctaatcctccagatcatcaccttcactgagatactcctcttctgatgaatgaatattgcaagaatgagcatatgacatactcaacaagtcacacagcaaatatgcaagtgcacagaataacaaaggatggcataatagggtttcatttgcaaaaacagcatttagcaaacatttgagaatttaataaaacagttagtaataaacaatattaatccaacgctatacaacataccctgttgtataggcccaaccattcagaacaaccatcccggctgcacagttctatctccaaaccaggaatataccattccaaaccaggagctaaacaaattattaccaattaaagcatcatttactatggtgtgaaggtgagactaatcacgaaaaacattgctcaactcacccataaccgcgggtacggctattcgaatagattaaactctgatcagaggtgtaccactgtacccacaagacacaaccccacatcatgtcaccatgtgcctcaataccaccacggtacctcggaaaggagttgtgacaataccccttgcacaacataatccattacagcgcacctttcctggatcataatcacccccttataaacaaggcatggactccccagcgacccccgtggacttctcgccacttcacagtctggcgcactataatgaatcatgctatacaaaagataaagccgttgcccacgctggcttgtggttggcacgataaatgtttcacaacagtagctcgcgaaccggtccttaactgtcatgagcacaaccatcaaaaccatatgctcacaacccaccttaaccaggttttaattatcaattaattaacatcacacgattaaccatcgtgagctaccatttaatgtaaccataattaaaataataatataacacagtttataattaatccctttagttagctaatgtttctaagcatggctaagcaaacttacatatagcatttagctgaaccaatccaacatataaggtttatgctagtcaaattataacccataggaaaataagatcatcttcggccattaattaattgggaaaggttcaccacccgatgacattcgaaaacaattcatagttgaaataaaataatagctttaaatgggttcaacatgctcaaaggtttgtttgggatctgtgtgacttgccttgggcttccgcaaacgcttcggaaccttcctcaacggaaacgctctcctccggaacgtcggaaactaaagcaattaaacaaaaattaacaaaacagtacaaaaacaagcataaacagtacatgtggatatttttaacatgtagatctcaattttagaaaaatttagcaacttgaaccacctgaaacggatctacggttatttagttatgatttttcgaagatttaatctattagaaaaactggaaaaggagaaaaaaccgatgatgacgtcatgatgacatcatcaatggccggcccgggttggcgacctcgccggagattggatggtcggctgcgaatttggaggacatgtacacgtagaggacgacgagacgaacccgacggtactcaccctcgagccaaacgacgaccgacgacggccggcgacgaggaggcgacggcggcggctcgggttggccggtggggatgggctacggcggccggcggcgaaggagaggtggcggccgagcttctccacctcttggcgaaaccaacggcggcgacggcaagcgacggcgacggcggaggcggcgtggcgacgcaaccggagttcggccggcggcggcggcggatggtttcacgcggcgacggctctacgggtcacgggagaggacgggagagggggcaaacgaaagagaaggactaggaggtcctatttatagccttggattgaagagatcggactcctcccgcaagaaatcgactcgggaaatcaaaagctcggttttggagataaactcgaaaacgagtttgattcggataaaatactcaaccatttgctccgatttttgggggtaaagatagaggaggatgtggggattaaaacccctctaacatccggactcggggtggccggattggggcggatttgagggcgcaaggtggcggctcgggctcggcatgcatggctcggccggctgctagaggaaggggaaggatccgacatgtggggcccacatgtcggtctcccgagaggagggggcggcggcgacgggttgggccggttttgggccggctcggccgcgcgggagagagggagtgttgggccgaattcggcccaacgacttaagcgagggcttttggaactttttaaatgaaaataatttgtgaaatgttgtttcaattattaaaaatacttcccttgctcaaacaattcccagaaaattctagaaaatagaggaacaaggaaagtatttaataaaattttatctagctcatttttatgttgaaaattttcctagataattagggtttagcttgtaggcttttaattttaattctaaaaatgatttaaacaatgcatttgtaatttaggcgatttttagggcgtgacaaacctacccccccttaaacggaatctcgtcctcgagattcagaagaacaggcgaacagatgaggatgagctgacttcaattcatcttctcgctcccaagtggcttcttcttctgaatgattgctccactgaaccttgcagaaccgtataacgcgattcctggtattcctctcgcttacttcgaagattcttatcccaacttccaccaaaatctagaacacaggctctcaacatatcttctaaaatttggtttactctttccgtctgaccatctgtttgagggtgataagcggtactgaaattcaaacgggtacccatctctacttgtaatttctgccaaaactttgaagtaaactggctacctctatctgacactatcttcttaggaacaccatgcaagcataccactctggccatgtataactctgcaagcttattccccgtgtaagttgttttgaccggtatgaagtgagcgagttttgtcaacctatcaaccactacccaaatagaatcatgtcctgccgacgttctgggtagaccggttataaaatccattcctatttcttcccacttccactctggaatcttcaacggttgtaacagaccggctggcttctgatgttctgccttgacccgctgacatacatcacatagagccacatattcttctatctcacgtcgcatactggcccaccagaattgttgctttaggtcttggtacatcttaatgcttccagggtgaatggaatacaaagtttcatgagcttctttcatgatagtatccttcaactccttattatcaggcacgcaaattctttctcctaaccacacagttccttgctcatcttctacataaccgatggcttttcctcttctcatgttcttttttatttcttggatatcaggatcattcacttgagcttctctaacttgatcaaacagagtaggttgagcttctaaagtagccacaaaacctttgctgactatatccaagtttaacttttcaaattcttggcataactcccaaggtaaatgtcgaccttctgacatattacagtagcttttcctgctaagagcatcggctacaacatttgctttccccgggtgatagtggatttccatatcataatctttaatcaactctaaccatcttcgctgacgcatgttcaaatcaggttgggtgaaaatgtacttcaaacttttatgatccgtatacatctctgtacggttaccgaaaagataatgacgccaaatcttcaatgcatgcaccacagctgccaactctaggtcatgcgttgggtagttattctcatgaggacgtaattgcctagatgcataggcaaccacctttccttcttgcatcaacacacaacccaaaccgagtcgggattcatcacaatacacttggaaacctttcctcgaatcaggcaaaattaacaccggcgcagtcgctagccttttcttcagttcttggaaactttgttcacaatcctctgtccacttgtacttcacttccttctgaagcagacgagtcattggtctggcgatctttgaaaagttctcaataaacctgcggtaataccccgcaagtccaaggaaactacgaatttctgaaaccgtcttgggttgcttccaacttaacactgactccacattgcttggatctactgccactcctccagatgagatgacatgaccaagaaacttcacttcggacaaccaaaattcacatttactgaacttggcataaagctgatgctcacgtagtttctctaaagctagacgaagatgctcttcatgttcttctttcgtcttggagtaaataagaatgtcatcaataaacaccacgacaaacttatccagatattccataaacaccttgttcatcagattcatgaaaaaggctggagcattagtgagtccaaatgacataacagtacattcgaacaaaccataccgagttgtgaaggcggtctttggtatatcttcctcacggattcgaagttgatgatatccagaacggagatctatcttggagaaaactgtagcaccttccagttgatcaaacaggtcatcaattctgggtagaggatacttattcttgatagtaacctcgttcaacgctcgataatccacgcacattctctgagtatgatctttcttctccacaaagatgactggtgctccccatggcgaagtactgggtctgatgtatcctttctgaagcaaatcatccacctgtctcttcacctcagctaattcattagctgccattctgtatggtctcttatggatagggttggttccaggtaccaagtctatccgaaactctatgtctctcttaggtggcatacctggcaaatcctcgggaaacacgtctgggtagtcttgtactatggggatctcttgtagagcaacttggtttaagatcacaccatgatatttaggagaggacacaaagaaagaaacggtttccccattgctactggttaaagtcaccttacggttggcacaatctataactcctctgtgacgagataaccagtccatccctaagataatatctagatctttggattctagcaagataagcgaggatgggaaaggaactttttctatttctatagtagcggaaggacaatactgtgtcgaagatacttgattgcctgggggattaactagtaaaggtctcccaagactaataacttccatcccatgattgctcgcaaaacttttagacaaaaaggaatgtgtagcaccggaatcaaaaagcatagatgcgggtatagagttaacaggaaacgtacccaaaaccacatctggtgcattctgagcttctgctgctgcaacatgattaacacgtgccttcggtgctggaacactggagttgttcgaggctggagcgttcttcacacgccgaggcttaggacacttatcagcataatgtcctggatcaccacaattgaagcacacccctggcttgcttccctgttccttcctgacgggctggttctgagctagagttgctgtaggacgagcaaccatgttgcggttgtcattgccacgattaccaatattgttgttgtaaaactggcgttgggggcggataactgatgaagatcctccttgagggtacgatggagcttgaggtcccgtaacgagacgcggcctctggttactgccctgttgtgccttgaattgggcagccctgcgcttcttctgctccatccggttatacttgtcttcctgacgaatcgccttgtccaccaactgctggaaatcccggaaatccgtagacatcaaggcataagacaactcatcattcagtccctccaagaacttctcctgacgctcttcatcggtgcgaacatcttccggagcataacgagctaaacggttgaaatcatggaggtactcggtgaccgaacgagatccctggttgagtgctctaaattctctcttctttagagctacaacacccgttggtatgtgtgtcttcttgaaagcggccatgaattcctgccacgtaataggctctccttcagccctgccttggcgaaaatgatcccaccattcagcagcaggaccatgcaattgatgcgaagcaaaataaactttctcctgctcagtacactggatcaaatccaacttcttctctaccgcatgcagccaatctcctgcttctactggattggtggtgcttgaaaaggtagggggtctaacacgtaagaaatctgccagcttgttttggggaggtgggggtggattctggttctgattgtttgcctgctgattctgtgcctgctgcactaacagattaatcagttgtgtttgttgggccagaatctgagctagcgtaggatctcctccattgttagcagctccacttccacttccacttccacttccggtgcgcgtgttcaccatctgacgataagcagagacaacaggaaagaacgacagagagacacccttagaacggagttatttaattaatttaaattctatattgctcttaactgtgtatgattacatttaaattgcattaacactatctcaccactatcttacactctgacaagcaaaagaactagactcatgctgttacatcccaccaatgatgtaagcaacaactaaaacccacacactcacaagcaaacttaaacaagcaatctaacacagcgaactacggcaacgatctaactaagcgactaatcccgccttgcgtcggaacgaagcgatggatcttcttcctctggagtagctggctctctttcttcagggtcttcctcttcttcctcatcacttatgatgtcgatgacaggttcagcacgatcgggcacagcttcacccatcacgcgaatcttcaaagctaactggagacgaggtggcggacaggttctctttcttgcgatgaggcgaagcttgggtgttggcggcggcgtttctcctttaagttcaactaattccttctggagacggtacaccttgctctccaacttgcaaatcttgcctcgattccagttttccctgtcatgagctgctttgtctcgctccacacttactgcatccatagcactaagcatatgcaccgcatgcatcagagtggcactctcttcaccatcaggacaggtataggttccatagtcttgaccatgaggcttgtgaggatgatactggaaagctgatgaatccaactcttcttcaaagcgttgacgcaactctccaatggccaccaaagctgcttcttgacaagcatggctgtacgatcttcctccagcttcgaacttaatggaaggaaggtcttcacgatcactagccaacgtcacacgaacacgacacttctcctcgttggggtcatgggaaatccggcgatactcaggagcaacttcatagcctacctcaaaagccatcaacctcagctccctgacgaatcctaacaccttgatcaaatttctcggtgaatggggcggcatctaaagaaacatagaagagaggaattaatgcatatttttttaaagttagctgcaccatctagacttaactgatttgaccaaagaggaagaaaattaaaagaaaagacacatactaagctattatttatatatatatatatatatatatatatatatatatatatttttgaatttaacttttgaaccgagacaaatcagtttggacaagtgaataaaataaaaccagaatacttaagacctactataagcacggtacaatgtcaccattaaaagggatgagtagtactagtgccaacatgattaaatcgataccataatagatgtacagtgccgactaatcaataagatttggtaaagagaaaaaagaaacattttgagaagaacaactttttgcttttaaaagaaaagaaattgaattaaataaattttgtgcataaccttgcatgtgctgccaacttaattaatttgtaagagaatagagaagagcagttctatttttttcaaaatattttgaaggctacttaaggtttaccatttggcttatcctaaggtcaaggtggctctgataccaacttgtcacgcccggaatttctatccaaaattccaaacgcttacatgtgtgttaaaccctcgtccaggaatcaaccgaggcacacaataacaaaattgataatagagtacaaataattaactatttaatattcgcaaataaataattactacagaggtagatagttcccctcaaaaaaaaaaaaccttctacgcagcggaaaaaaaaaactataacaaactacggaacagctatggcgactccactccacaggcatcttaaccagaacaagcctaatcctccagatcatcaccttcactgagatactcctcttctgatgaatgaatattgcaagaatgagcatatgacatactcaacaagtcacacagcaaatatgcaagtgcacagaataacaaaggatggcataatagggtttcatttgcaaaaacagcatttagcaaacatttgagaatttaataaaacagttagtaataaacaatattaatccaacgctatacaacataccctgttgtataggcccaaccattcagaacaaccatcccggctgcacagttctatctccaaaccaggaatataccattccaaaccaggagctaaacaaattattaccaattaaagcatcatttactatggtgtgaaggtgagactaatcacgaaaaacattgctcaactcacccataaccgcgggtacggctattcgaatagattaaactctgatcagaggtgtaccactgtacctacaagacacaaccccacatcatgtcaccatgtgcctcaataccaccacggtacctcggaaaggagttgtgacaataccccttgcacaacataatccattacagcgcacctttcctggatcataatcacccccttataaacaaggcatggactccccagcgacccccgtggacttctcgccacttcacagtctggcgcactataatgaatcatgctatacaaaagataaagccgttgcccacgctggcttgtggttggcacgataaatgtttcacaacagtagctcgcgaaccggtccttaactgtcatgagcacaaccatcaaaaccatatgctcacaacccaccttaaccaggttttaattatcaattaattaacatcacacgattaaccatcgtgagctaccatttaatgtaaccataattaaaataataatataacacagtttataattaatccctttagttagctaatgtttctaagcatggctaagcaaacttacatatagcatttagctgaaccaatccaacatataaggttcatgctagtcaaattataacccataggaaaataagatcatcttcggccattaattaattgggaaaggttcaccacccgatgacattcgaaaacaatgcatagttgaaataaaataatagctttaaatgggttcaacatgctcaaaggtttgtttgggatctgtgtgacttgccttgggcttccgcaaacgcttcggaaccttcctcaacggaaacgctctcctccggaacgtcggaaactaaagcaattaaacaaaaattaacaaaacagtacaaaaacaagcataaacagtacatgtggatatttttaacatgtagatctcaattttagaaaaatttagcaacttgaaccacctgaaacggatctacggttatttagttatgatttttcgaagatttaatctattagaaaaactggaaaaggagaaaaaaccgatgatgacgtcatgatgacatcatcaatggccggcccgggttggcgacctcgccggagattggatggtcggctgcgaatttggaggacatgtacacgtagaggacgacgagacgaacccgacggtactcaccctcgagccaaacgacgaccgacgacggccggcgacgaggaggcgacggcggcggctcgggttggccggtggggtcgggctacggcggccggcggcgaaggagaggtggcggccgagcttctccacctcttggcgaaaccaacggcggcgacggcaagcgacggcgacggcggaggcggcgtggcgacacaaccggagttcggccggcggcggcggcggatggtttcacgcggcgacggctctacgggtcacgagagaggacgggagagggggcaaacgaaagagaaggactagggggtcctatttatagccttggattgaagagatcggactcctcccgcaagaaatcgactcgggaaatcaaaagctctgttttggagataaacttgaaaacaagtttgattcggataaaatactcaaccatttgctccgatttttgggggtaaagatagaggaggatgtggggattaaaacccctctaacatccggactcggggtggccggattggggcggatttgagggcgcaaggtggcggctcgggctcggcatgcatggctcggccggctgctagaggaaggggaaggatccgacatgtggggcccacatgtcggtctcccgagaggagggggcggcggcgacgggttgggccggttttgggccggctcggccgcgcgggagagagggagtgttgggccgaattcggcccaacgacttaagggagggcttttggaactttttaaatgaaaataatttgtgaaatgttgtttcaattattaaaaatacttcccttgctcaaacaattcccagaaaattctagaaaatagaggaacaagcaaagtatttaataaaattttatctagctcatttttatgttgaaaattttcctagataattagggtttagcttgtaggcttttaattttaattctaaaaatgatttaaacaatgcatttttaatttaggcgatttttagggcgtgacacggcagcagcacaggccgctggcggtgggggagctgggtagtggaaacggaacacggtggaagaaccaacaacacgcttccgcgcagtgcggataaagcgtgggccacggcgggagaaagcaactggggtgtgtcccggggtgtaggaagggctaactgggtgtgggtagggggagtacactggcgagtacggcgcacgcgagctgggggagcacgggccactgggagtgcgggcagagccgcgggagctgtgggaggacaggtggctggcgtgacagagacggcctgagtcccaagagatagtgtcaactgaggtgacaccctcctcggccaaacgggcctccagagcggcgtagcgacgggcaagggggcggtaagcctcaaggagtaggtcgtgctgagtggcctgagcctccgaaagctcaaccatgcgagtcagcactggctgagactcgctgtacggacaagggtacctggcgtctgcgtggccagaaggaaggtgtggaagctgccggaaggcggagcccccgagacggtggctgtagtcgtgggccaggcgacgaagcgcagtccaggagaggtcctggtacgcgatctggagaatgggcctagccacgatgaagtggtgtgggcggaggccagctccgtgtatacctccacgggggtaaaggtacacagagagctcacagtgagggggaacacggtccacggagtaccccgtgtactcgggacacgagaagccaaggaaacgggcgaggtcacgaagatgagcgacgtggtgaccctcaccaaaaccgtgggaactgaagctggcgttcactgccatctacaatttttgaaagagggagaaaagatcagtaaccattttagaaacaaactattaaaaatgaagaaaacaaaagaaaccttagcttttcgcaagtagttttgaacttagtatccttagggttgtcctaagcgtcgggtttcgtcctagtgcaaagcctgtgctctgataccatctgttgtcacgccccgaactagtcccaaccggaactagcccgtgacgctccaaattaacctgttaatcgataccagtcccaggaaacagtgctggtatcacagggagacagaatatcacagcaacagaggtctctttattatagagtagaggtacagtcatgttgggctgtggacagatcccgagctcacaactgcgatacaaaagggaaaaggaagccaggacttggaccaaacaacacaggcgcgacttgggaactaggccgaaaccttaaaactcatcgtagccggcttgctcctggaagaactcctcaacagcaggatccgcttcatcttcttcagcaactgggggggggattatttatatagagcaagggtgagtacgggagtactcagcaagccatgggaaataagtgtttaatgcaggcttcaaagaaaggctgttgtttttgcaattgattttatttgaacccttttctaaaaacaactaggtgagtgcttctcaaacgacacggatgagacagtgcgtctcgtccggtcggagtatgtgcaatgtatcagtctttagaattgtaacaaggttggcacccggccaatagcttttcaaatggccacccgggccaacaactttcaaacggccacccgagcctagctgatcccatcagctgcagattttttaaacatcgaacccctttccacaacagcaatttcacaagcagtagtcaaacaaaactacgctaggaatcacctcacatccgcccatgaccgtgggcacagctgttcgaacagtttgttaacctctgcagagggggtacactttacccacatgacattactaacccggatcacccagcccgtggggatcagccatgtcgggagacctccaagctttcatgacaaggcatttccaaagccgacacaggtttaccatatgccgacgagaggggtcccaaaccaacaacaggttaggtcccagaccatactgtgccaggaagcccaggggtcctccccgacaccaccccggcgaatccacatgtctctcggcatcaaggctctcctgataagctagttactcagccaggggtgtcccattccacccatgtggtcgtacttgacttatgtttggatgaaattccaaggaaacggtccttaagtgcgagagcgggaaaccgtacacccggtacgttccccggtccgcggttttggaaattcatttagttcgcaagcaccgacccaggtgtcgggttttccaagtcttttgtaaaacccaagttttacccaagaagtttttcagattttaagtttgaaggcgtccgtcgatactcgcaccgggtgcacgaatatcgagacggaactagatggttacaaggggacatgatataacaattaacaaaggaaggatcaaatgcaacaaattaggtaggtccgccaatctgcctaacagacgggacaacagattaagtgcgatcctatcaatgcataatatttctcaagcaacataattaaatttcaaatataggttcaagatgttcaaaggtggcttgccttgctcgagatctggagcttgatcctcgaaatcctcgcactgcgggtcttcgggctccgaaactacacgcgaaacgggacaactcaacaaacggcgaaaataaagccctattaaagacctctaagcgtgctattagatagatctcgagatttgaggaattttggaagttgaacggagtcaaacggatttacggttgggaagatattgaatttctaagattattggatttttggtctaaaggaaaaggatttaattaaatcctttttggaaaagaaaagaaaagaaaagaaaagagggagggaatatagacttttctagggcggctagggcgcagcccaagggaaatggagcggtccggccgagctaaatgggctgaccggcccaaggcggcccaaggcggcccaagacgcgcgcgcgcgggagtggaggagggagagagcgccggtagaccgggctcgccacgcgtggtcccgggtgggacccgcttgtcggtgacacgattcaccgtgcggagcgagcacgtggcgcacgcgcgcgggcgggggagggacgcggtgcacgcgcgtggttcgcggtggaaaggatgcggcgggcccacgcgcagcctcacggctcgcggtggaacgcgcgcacgggaggggctgaccggggttggcccgacccgatctcggccgagctgacgccgacgtggcgcctacgtggcgcctacgtggctgccacgcgggctggcgggaggaagacgaaggcgccggccgcgaatggacggcgggcggcggcggtttctccggggcgccttgtgacgatgaggggcgacggggcgtacactgggatgacgaggaagaaggagagggagcgagccaacggctcggatttgccggagggagtccgtcggcggcggatttcggcggcggcaaccggtggagggcaaagggggaaacggcgacgaggtcacgaggggccaattcctggcggtgagagcatctatacggccacgggaatctgttgctagcgtcggattgggcggagctacgccgagcgaggccggcgacgagcgggtgcttcggagctcgggcggcgacggcggcgagcacacggtccacggctcaccccggggcgacgggagggggcgcgcggaccaggtccacgggagtggggcctacggggcagcctcacggtccacggtggaccgggtgcagccgggctcacaccggccggcgccgtggggcccacgcgtcagccgcacccgaggcgagggcgaccgacggccggcccccacacggcagccactcggcgcgcccgagggcggccacgccggcgcggtcggcgggaggcggcgcacccacgccccgatggtcgccgccggcgacaaccggcgcggcggagcggcggccgagagaggggagggaagggggaaaggaagcaacggtccacggctcaccccggggcgacggcgacgacggaggaggcggccggagcggagggaggcggtggcgcggctcgggtcaacggggacggcggcgctccggcggtcggtgaccgaaacggaggggtggacgaggtcggcaaggatgcggcgaagccgaaggaggcggcgccaaggtgggaggctgttcggggcgacgacggcggcggaccggagctcggcagcgacgacggagagagagagcgacgtcgcgagctcgaatccggcgaggaggaagggcggcgagaggcggaaccggacggaggaggtgcggggagggtctaaatagggttggaagggggagagagcggccggggaggaaggaaaccggcgcgggaggtcggccgccatcaatggcgccggcgagatttgcgggggcaaatccgcccatttgaacgcgagagagagagagggaaaaatgggggggaaagggagaggggatcacggggaatatttccccccactttattgcacgcggggacgacgggaggcggcgggattcacggcagcggcggtgctagggcgcgggcgaggcggcgggagtggcgggaggtcggggatgacgggtgggccccacccgtcagcgagggtggcgggcgggcccgccagtcagcggcgcgcgcgcggggagaggccgagtgggccgcggggagaggagagagagagagaggggggaggcgagatgggccgggccggcccaagggagggaagggggacttttagggtttttctttttataaaactttttcaactttgtttatttcttaataattattatttgtgctctgaaaattccactaaaatttatttacacattttaggcttttaggaaatatacaaaaatcctctaagccttatttgacttttaactttgcacattttaattgttggaggctttcacaaggattttaattattctaggcataattttaaaggatatattttagagtcattttgggacgtgacacccatcaatggtggcataataggccagccattcacgcggaaacaccagtcgacggcggcgaaggcaggccggcagtgaagtcgtagacgcccaacaacgacggcataataggccagccgtgcaggcggaaacaccagtcggcggcggcgaaggccagccggtcggtgaagacgtggatgcccatgaacggtggtgtgaccaaccaaccatataggcgaggacaccagtcggcggcgacggaggcaggccggcggtgaagtcgtagacacccaacagcggcggcataataggccagccgtgcatgcggaaacaccagtcggcggcggcgaaggccagtcggtcggtgaagacgtggacgcccatgaacggtggtgtgaccaaccaaccgtataggcaaggacaccagtcggcggcgacggaggcaggccggcggtgaagtcatagacgcccaatagcgacggcataataggccagccgtgcaggcggaaacaccagtcggcggcggcgaaagctagccggtcggtgaagacgtgaacgcccatgaacggtggtgtgaccaaccaaccgtataggcgaggacaccagtcggcggcaacgaatgcaggccggcggtgaaacgaatcggtagcagccacgtgccttggaagcagaactttggagcctgggttgtgcggtctggcttggatcatgaacggtggccggtgtcacactgtgcattattagaatttacgtgcgcaggtgtatagccaacagccatggtcggcgttcagcgggggcgattcccaaaattaaccaccactgccagccgaatccgtgatgatgcttgccgcgtggccacgactccaaaaatccgactgccacaatatgacacggtagctccagcgatacatgcatgcaaacagatagaaaatctggttaggattaggaaattaatcccttttagatgcgtgatgcatgcattaattaggtaaatcatgcatgttgattaattgaatcaactaatgcatgtgttttctcctggttgccggtagtcccgagtgcaatcaatgacaaaaaaaactttgaacgcagtccggaggcctgcaccgctcccgtgccgagcgtgagtcacgccgatgtgggcattcagtgatcagggagcaccaggacgggtcggatcgcctagagttggcttcaacaccatccagtggatttggaccaatctcagccacaatttatcacctacggttaagattaaatcaatacagctcaacctatccttaatttgttccttccacgttttatcttaccttcatcaaacttttttttttacgtaaaccttcatcaagcttgtaaacaaggactctacgatcggctatatcaacgagctgtacacagcagcatcaaggagctcgacatgatgtacgtacatgttggtacttgctagcgctagcgatagctttgcttgtagtaagctgtccagttgccctgaaccctgattcgaggcggagagctaatttctgcaccatcgcaaggctgcccatgttcaccatctgcgatatcactcttctctacactgagaaaatcttctatgttcgtctattaattgcaggaacaatattaattacgtttattttcttgattatgttggaaatagaacagttgaaaagaaagatccaaatatgcatcaattaagggagtcaattaggatcttaaccgtagaaataaaatgatggatgagatttgcccaaatccaccgggtgaagttcatgccaactctaggggatctgaaccccaccaccagaactacgtccattcgtctcgatcttggccggcacataaaaacaggggattaacaatacagtaaaaaaatcaatctaataaaagttagattggaacgataaaccggcatcaccgatttgagcaacggaactcgttgagattgatctcaacccttctactgaaattgattccatcacatttcttgatgggaaacacggcgtacccctacctggcacaccaactgtcgaaacaagaattcagcaataataaaaggggtagcgcacaagacctaaaagtggatggatatggagacaaggatttagacaggttcaggccctctcgatgagactgggttagctagccagtcgggatgaaggacttccttaatgaagcctactgctaacagcttggttaactcctccttgatcgcatcttacctgtcctgagcaaaacggcggagtccttgcttgatgggtttggcgtcttccttaacatgtaaagagtgctcaatcacctctctaggaataccaggcatatcggatggtttccacgcaaaaatatctttattattctgaagaatggtgatgagcgtgctttcctatttacaatctaactcagcgcctattacagcagtcttatcgggatcggagggatctaggggaatctttttcgtcttggcgtcgctctcttcggtcttcgtcagcttggttgcaggcacttctccctcgcttgcgttagtcgcagccagtcggatctcttcgcgagcgagagtgttctcatgggtttgggccatctcgcaactttctttgtcacatgtaacggcttgtttgatgtcgctccgtagtgatatgacccctcgaggaccgggcatcttcatcatcatgtaggtgtagtgtgggacgaccatgaatttggctagaaccggtcatccgagtatagcatgatatgctgtctcgaaatcagcaacttcaaaacaaacattttctgtgcgaaagttctcccgagtgccgaaggtaactagaagggtgatctggccgagtggtgtagctgacaatcctaggataacaccgtggaagggtgcattactcggctttaattctgtgcggggaatttgcatatcatccagggtcttagcgaaaaggatgttgagtgcgctaccaccgtcgatgagagtccgtcggagcttgacattgcgaaccactgggtctagtaccagggggtaccgccccgggtggaccactcggtggggatgatctgagcggtcaaacttaattgctatctctgaccaccgaagatattggggcgtgttaggctaaactgcattgatctccagttctgttaacttctgctttctcttagattcataagtcaggggtccgccgaagatgtgattgagttctttgcgatgatcttgaaaaccagtcggggcatcgtcttcatcatctttcttctttgatgtgccttgatctccgtctgagggtttatgtgcattcttgacgtattgctccgctaactgtttgtagacgaagcaatctttggccatgtggttggagttgggatgatgcggacattgggagttcattatcttgtcgaaggtgttgacgcgggaacgttgtcgggaagatggagaggttgttgccacaagttcttcgggcttacacttgcgatccttgtggttgttacttccactccctcctgcagtcggcttgtccttctttggcttccaaatggtgcccgactgcttggacgcggtaatagcatctttggatttggcatactcgttgactttttcaaacatctgcttgaccgtcctgggaggtttgcgtccgaacttgccgactaggtcgtcgtggcgaatgcctttggtaaaggcggcgatgatgacgtcgtcagtgatgtcggagatcttgttgcgtttctcggagaagcgtcggatgtaatctcgaagggattctccaggcttctgaacgacgttgtagagatcaaactgtgtgctggggcgtttaaaggtaccctggaagttggcaatgaagtggtcgcgtagttctgcccatgatccgatcgtgccgcggggtagcccgtggagccatgaccgagcagaatccgctagggccacaggtagataatttgccatggctttgttgtctcctcctgctgcgcggattgcgagaccatagacggtaagccaagactcgggattggtggtgccgtcatatttctcgattccagtcggcttaaagctggctggccaatccactcaacgcagatcgcttgtgaaggcagcaactccgtccacgtcgtcatcgtagcgatccggtgaatgatggcctcttgctgcgcggcgctggttgatggtgtcgcgaagatcgatggggcgccttcgatgtgggaagtgtggtagttcaactcggcgctccctatatcgttcgggaggcgaacgaacagaccgttcatcatgtcccctgctcctgcgactagatccggcgccggcaatgctgaggcttggctagtgatagtcttgagatcgaagatgagggactcagctaccagtcgaggtgcgagtgcttgcggagttggctggaaccgatgcagcgatcatggtcttcgtctagttcaagatgttgactacatgatcagcttggttgagtgcgacttccttgaggagggtgtcgaggagagtgattgctgcaaccgcgttctgctggggggtgcgaaagaccgctgtcccatcgacgtcttgttgcccaatgagctctctcgctcgctgcccagattccaagatgtgctgtcgtcggtcttcagcctcctttgcaatctgttcgcgatcctgttgctcacgctgtagtcgttctcgctcttgtcgctgtcgctcttcctccagtcggcgacgttcagcttcttgccgtgcgcgatcttggtccgcttctcgggcttggcgctgttcctccgtttcgttgtcggccatgaatacgccgaagaagaggggcgtgtagttatcctcatagctgtcgtcgaagttgtcgaggtcgccatggtcgtagtggtagccgaagtcatcgtagtcgaggatctcggttggtcgagaactgacgccgggggagctgaggtagccatccaactcttccgtcgagactgtcccaagaggttggagtataacgccaacctccctggatctagattggatcggggccgaagccggagctcgcctagatcttcgagtgggagatatcttgactgtgaagacagtggccaaatcatcaggaagtttcatcaggattgggggataggacccgtcgtcttgatctggtcgcggaagagtagattggatctcgtccgagtggtttgaagccgactcgggagagatgatcttggagtaagcctcggccgagtttggaataccgaacggcacagggacctggtctctccccgactggtttgaatccgaatcaaggagagagatcttgccgaagtcattggtgatgaaattgaggctgctgaaccggaacgcctgcccgggagggaagatgaagtcgtcgatgccagaaacgggacccatcgcacttagtcggcaaaaacttgacgctacccctacctggcgcgccaactgtcgaaacaagatttcggcaataataaaagggggtggctatcaagctaggaaagtggatgggtttggagacgaaggattttatacaggttcatgccttcttattcaagaagtaataccctactcctgtccggggatgattccgccgagtgtgttattgattgtataaactggaaaaaagaagcgcgccccaagaggcacacggaccctccttatataggggaaggaatcggctttacaaaatacagtccatatcctaacggaatatgtgattatagataaaatacaatcgtaaccgactaggatcccgggtatttccttgacatataagttaaaaactaacccgagtcctcataaagatattctatctatatttggtaccgtatatccgactaaagtataactgtcatgcagatatggggtatccataatctccacaccatcaaactgaagtttcggatatatagcttgatgagttgacgtggatagactttttatccttttttcaacgcggtgtggtcaaattcaaggagcgcccgctatatagtttctgcggcatgcgtgacgcgtcccaacacgatcgggatctctataaatattcatcggtagaatcagcccaaatcacaggcacccaacagtacacatacgatcgcaaccctaattagctcaagcggcaaatacggataaagccccctaattcacaatggcgcagatcatagcccggcttgttcttccgttgtcgttctttgcaatcctagtgttcctcctgcctgcccaaggttacaatcttcgctatctctctctcctctttctctcagctctctcttaatttctctctctccacagcaattttttttctgcaatatctgattttggtaacttctccggcctggccctcatatatcatgttggtcacaaacaaaatgtgatgtttcaggctaatataagaacattttccaaaccaagactatattttagaatagatccacttacttttctggtactacttcatcatttcttttcgttttagctatcatcgaattagcaatacttttttctcctactcgttttcttgccgtattaatgaagggtatagtagttttttaacaacctatttaatctgctttgataaactgaaactatactcttttagggatggggggagtacgtactgagcctagctcatattggtgatagatttatctttggcttaaatataatatactcgatcgtgtttccttttgtttatttacgtttagaatgattgctgccattccaggggagtctcagcggtgcgcaccatcaagcatcaacattagacagacaaacactggaaataatgactcctgctagtgtgcaggccgattgctagatatcttgtgggttttcttactcactgaaaatacgagttaaagattgatcagttatttgtattccatgacaaaataaaataaatggtctggttttcgtatgctaccaagtatagtatatgtttgttaaatatatatttcgtacttccagggtctcaatatatacctgaaggggaaagaaatgatattcatttgcttgagttccacgctttgatcgagacgatggtcatcgatgatacgatgaagagcttttgccatctatttgatgagtagtgacgtagtgtagtgaagtttacaatcagcaatgtcgtaaacaaaatcccaatcaaccaaaattaaagcgtcctggacagcaaaaaaaagattgtacaggacaccaatttcacatgttctccaggtgccttgttatttaattagcacaaggaatcgtacctaaatagtgcaattacaatctagacatctccctctgataggagttcaaaatattttgtcactttgcctgctgtgtctagctagtgcgcctcacatatgtactgtcgatgcttatcttcaggatcagtgtatacttttctgttaaggagatcaaagataaactgttcaaaacattgctttttggacgaattaggtcttacttagtttgctatagttctgtttttcagatataaacttattattgtttccttgtagaaactgggatgtttctgctctggtggttagattttcaacattttgcttccgatgtcatgttcgtttccaaaattgctatttttattgagatttcaattaaaactgttctcatttgttcagaaaacggtttgagtttttcccccaagatcccgcaccatattctcatttgttgctgtacatgaatttgtatgtaaaatgaaagaaaactactatgcagatttttggatgataaactactcgattgatcttaagaaaatattttataaaacatttgctacgaaaatttatataatatataaacattttgtgcaagttactgatcagatagtaatagaggaatatacactatatcctagcctcgataaaaggtgatcgaaataacgaagaaagcgtataggaaatctatggagataaaaagtatatatagcagcccattatagtatagttgcaaaaggtatacacatcatcgctttccaagtacgaacttccgtccttccattccatccttagctagattcagggttgtaatttgtcatcctccatttctctattcttgcatgcaggcgtcaagtatgccgtcatttaaacccataaaggaatcgatcatccttagctacattcagattgtaatttgtcatcctccatctatctctcttgcatgcgtcaagtagccatttaaactcataaaggcatcgatcatatcagtcaataaaccgcatgcgtatatgataatgctattctagccagcatccggcgcggctgtgcggcgctaattgtatgctcgtggccgtttttctttttctcaaaatacagtatataaatacacgtgcgcgcactcacatctacaaacatacacaactaactcctataaataactccgaaagactaagtaaacatattttgagattaacaaagtcatcatagatgcatcactctcgacgcgactacatcacctataccactaaaagataacaattaactgtaaatacgaggacgcgtgttgagtctataacttaaaagctaggcaagtaggttccaaaaagaaagtaacaagtaaaactgtacttccctatatatatatatatatatatatatatatatatatatatatatatatatgtaggtttttcaactacacaggagacgcaaagagatatatccattactagttacttatgcacagcagatacacatacaagaaagtgatgtgtatgattagggttgaaactataagatcaacgtgtgttttgattcttattctgtgatgaacaattggcatctgtgattattggttttgatatttgcagattatcgtcgaagtggttttggagataatcaattttcaggtgatgaacatggtttgctgttttgtcgggagaccgggcggtggttgccggtcagaccggctcatgtgcagcggtcagaccggccaggcccgcggtctgaccagccgacgttgtgtcggtttcagtttcgggttgtttctttggatatctgtgattgttttatggttatggcttctagatggatactatacggatgtaatactgttgtttgctagtaatgagtcaagttggggatagcttggtctcggaatatggtttctttgtttgtttcatgtgtaggtgactcgatgcctcgggagagtatttgcggtgatggaccgggagtcggcttggtggtaagacgatgtccgtggtggtcagatatcatacgggatactaaggctagagttgatgcacgtggttgatggagattctatatggcatacgatggaggtattgtgtgcgtatgggatgcggagtcaaatttggaaggagtccaaatttggtatgattggttatgtaaagtttgtgtcttgtactagagggtttcctaaggtgtttaggaatcttagtatgagtttggttcgtggctttaggctgcctacctcatgtataaatagaggggtagcgtgaggcttcccggtatcgcttttgtattgctttagagagcaatagagttgagttttgagttagggttttgagtttagtcaaaatttttgtaaggagtgctgttggtgcactttgtaaacacagagagaatcaataaagtcgtcatccactttaagagttcttcgatttgtgtttaccgggtttcggctgtctaatcggcgatctactagcggtcagaccggcgggaagcggcggtcagaccggcaggagcacggcggtcagaccggctgcggcgacagcgagcagcagctgatctcggcggtgggaccggggatataatctcggtcagaccgacagcaaccaggcggtcagaccggcaggacaacttcggttagaccgcgatccgtcgaatttgagggtaacttttatttccgctaaaagtttttggtttttgggtataccaaccattcaccccccctttggttggctttgttcttgtgattcgatcctacagaaactggtgcggatagtttctatccgtccggatcatttttcggattcggacatattcagtcggaactatccagaaattcttggattcggaaacgaatttggaacatttttctcataaacggaaacaactatagtaggggtactatccgtcggaatcgaaaaacgttcggaaactatccggaaattttttttctcagatatctatagacatgtatcaaatttttgaaaaaagacatgtatcaaactttatattgagatctacaattttcttgttaactattttattatttgagttcatttaggggtataaatattcaatataaattattatatctgtttttacaaaatcttatatctatgattcaaacgacatctaatagagacgtgtttcgtatcaaagttgtagagctaaatagattctacaatttgtagtttctaacatttgtatttgaaaatatttaaagtatagaacaaatattacaagtttcgaagatgtgaaataaaataatagcatcttcaatttatacatcaagaacttgataagtgatattataagtaaactatatatgtagtaaaagatcttgagattagaaaatgaatatttaaatgtgggcactcagcggaatggccataggaccgcctataaaaattgaggaaataataaatgtttgagatattgacctaaaataacaagggaaatctttttttttcttcgtctttatgttaggagtggttgagccttatattttgggatgagaagagtaataacaagtactttttgttagactgtataatgtatccactacgtgcggctaatgttttggcttgacaaagaaaaaagcgtgacaattacatatgtgagtactgcataaaataaaaccattttccatgatatttaatttctactaatgttactctgtatgtcagctatcaaaattctcattggactgcccgtacgcaccctcaccatttggttgtgaacggacggaacagcaaagtttaagatgacacggaattaactgcattaaagatgaacagttcaccagcgtgggaatagatgagtacgtaattaagcccattggttttgtttggtaaactaacccggcaatctctatgctacagggtgtttagattcagggtgtaaagttttagcgtatcacattggatattatatagcatgtcgtatggggtacgtgttcggtaccaataataaaactaattacataatccgtcagtaaacaatgagatgaatttattaagtctaattaacctatcatttacaaatatttacttactgtatgactatattatcaaatcatgtagcaattaggcttaaaagattcgtctcgcaaattaatcacaatctaggtaattagttatattttggcctatatttaatactttatgtaggtatgcaaacgttcgatgtgatagggtgtaaaatttttacgttgaaattaactaaacaggggctatatgcatatatcgcgcaaggttaagacgccgggtcacctacacgcctcgtcacccaccacatagctttaagtactgcatcagcgacacatcagcagacgaattcgaccggtaactagctgactgaaacggagacgcgtatacacgtgtgcagaaaaaatcttcactgccaagagaaactaaagtcaaattaaattagcagcgtatcatgccgctacttttctgatcgatataactaattaacacgactgggtttctataaattctctcatcggtagtacgtacacgatcgatctatttataagcgctcaagcggcaaatacgttctgattacccctctgtaattcacaatggcgctcaagcggcttgttctgccgtcgttcgttgtaattattgtgctcctcatggctgtccaaggtaacaatttatttctgcaattttttatgttggtaactacttccctctccgtcaaaggctacagttttaacccaaaaatttgttccatgaagattgtaattttagagtgacctaattcttttctctctaatactatctcatcatttcttctcgttttaaccaacgaaccagtagtactctcttctcccattttttctctctaagtcactgtatgaatgacaggtatagtagtctttgaatctcttgcttaatctactcatataagctatcagagacagtggaagtctaagcgtgtttctttctttttaacacaatgttcaccgccatttcaggggagtcccagcggtgcgcactgtctagcatcgatgtcagtcagaccaataccgggaagaaggtcggaacactcgacacggtgttccaggtgatggtgatcaacaggtgccagtgcgcggtgagggccatcttcctccgtgccgatggcttcgcgagctcggtcacaatcaatcccaagctgttccgccaggctggtgctgtcggctacctcatcggcgatggccggcggatcccgagcggcgagtctatcgcctttcagtatgcgtgggaccactactttcagatgactcctgctagcgtccaggccgattgctagacatcttgttcgtggaagtatgactttcaagattaattggtatgtaattttgtatttcatgacaaaataaatggcctggttttagtatgctgccaggtgtggtatatgtttattgatcatatatttcttaattccacggtttcaatacctgaaggaaaaaaaaatgatattccttgcttgagttccacgctttgatcgagatggtcatccatgaagagcttttgcagtctatttgatgaatagtgacgtagtgtggtgaagttcacgatcagaaatattgtagaccaaaattaaagccacatggagaaaaaaaaagattgtacagcacgccaatttcacatgttctccacgtgcgttgttagttagtactaggaggaatcttatatactagtgcaactacatctccttttcatatataggagtgcaaaatatttcgtgtcacttgtgcctgccatgtatagctagtgcacctcacatagatgatagtccctccgtctcaaaataagtgcagttttgcactattcacgttcaacgtttaaccgttcgtcttatttaaaacatttttatgattagtatttttattgctattagatgataaaacataaatagtactttatgtgtgattaaatattttcatttttttcataattttttcaaataagacggacggtcaaatgttgggcacggatatatccacggctacacttattttggaggtagtatatatatagtgtcgaccgatgcttacccacaggatcagtaagtatatacttgtccatttaggagatccagataaactgttcaacaagatcttaatttttgacgaattaggtctacggttttgtttttaagatacaaacttattattggttagttcccggtagaaaccaggatgtttcagctgctggtggttaggtttttcaatattctgcttctgatgtgaggttcattttcataattgccatttttattcagatttcaattgaaactaagacttagaaaacggtttgtgtatttttttcccctcacgattccgcaccacatgcatatatattctcatttgttgtgttgtacatcaaaattgctcgatataataaaaaaattatataaaatattggctatgtataatataaacattttgtgcaagttactgatcagatttaaagtatatatatatagaggaatatatatactagatcctagcctcgataaaaggcagataaatttacattaatatgaactgagaatgctactactaccaaagaaatcattccagtttcttgccagcgatcgaaataacaccaaaacgaaggaaatctatggagacaaaaagcgtagtagcccattggttgcaaaacgtctcgtgcaagggctagctgaccgctactgatctgctgtccacggcggcgtgcacctgcagccacatcgcgctttccaaattccaacttccattctagcttccatccttagctagattcagattgtaattaatctgtcatcctagctccaactctttcttacatgtgtcaactatgccgtcataataactcacataaaggcatcatatcagcctccaataaaccgcatgcatgctaatgcgccttgctatagccagcatcgtggcatgttatttttacaaaatatagtgtacagatgcacacgcttaaatacacaggtgcgtatactcaccactgtaaacactaaaacacacgtacacctaattcctaaaagtatagaaaattgaaccggtatacttcgagattgacaaagttaattatcatggatgtctcgctgtcgatggttacgtctcctactactaaaagataacaattaaatgtaaatacgagcacatgggttaaggttaggacttaaaactggctgagcatattccaccacaaaaaatttcataagttgagctctacttcgctatttataactacacaaaagactgcaagagcgcaaagagatacatatatatccacttatgcacattacacgcacataaaagtgtgtataatagatgcatagtagaactatgaccgaactaatttcatattaaaaatctaccgtcctatatataattgtgggcactaattttaaaccgggactattatggtttttcactacccaacaaagatcagttctctaatagtgtagattaaactgaaccataatagttttgttggtttctttaaccatgacattctagctaccacatatctagttcttccctactccctagttactcatatataatttgtttatatgtgctttataaatataaaacggctattctttataaatataaaacggctattctttatacggctattctggcacgtataaacctcaattctctcccgtttcataattcacattttagagaaggtcaagctcaaataggtagaactggaactattaatataacttttaaaatatttagtttgaagacactagataacgatgtatatattactctttaaaaataatttaataaaattaaatatacactcttctttttataaatgttaaataaaaaatattgtaaagaatatgatttataaaccattttattttttaaaacgttaacaataaggtaaccagacgaagggagggagtatgtacatagatataacaatttgcattaaatttaaaatatgaaatatcgaagctcaaaagatctgaaaggaaaaaagaacgaaaagataaagtgcccagcacatctacgacagctgagcacacagtttgatctccatgatactcctcatacaatatttaataccatacttgcctctaacaattagtccacaaattaaattgtgaatttactagttgtaacatgtgcattgagctagcttttagggtgctataaggcttcctccgggatggaccaacatctctagattttaggccaacataatgttcaaacaaatggtttaaattagataaaattcctatatattcctgataatattcgtaagaccttatgtaaccttaattgcttcattctctacatgttcgtgagttttcaatttgatcctctttatctctattccatttgttgaccatgggtagactataattcttttaaaaaaatgagtatattgctccattgtcatacttatgtgctacctaattcacaaatctcaatatggaaaaataaaataaaatcgaatggtacaaaattatctgaccaaaaattttaaaaataaaatttaattttttgaacaaatttattattgttttacttctatgtcccaaaatataacaaacttctactactcaaaatttgcgacatgtaggatgagttatttttttctgtctcggtgaaaaaagtaatatgccttcaataccgtgagggaaaggtgaaaagaacatgtgagccagaagtcaatgcgccgttgcaaaagggcagcggtttcggaagatcgatcaatgagggcgagtgggtcgggcatggatccagtgatggcagagattataggatgcatatcctgtggcgacgagcagcgacagcaaggatctagtgatgaccggcgcaagaagcatgcaccgacggtggctggagtgattgttgggcaatatctcaccataacatggtggaggcagaaggaggtagatctcaccaacattcaacttttcttctccttacctcaaggtgctcaccaatgacatttcacagccgcatagcattcgagctcaccgaactcgacgatgtcaacagtgttagggatgattatgagaatgatgctgccaacatccagcacaactctctcgcattgtgcccttgtcgttcagccatgtgaagccctcccacgtcacaagctaatacaagtaaaatacatataggtatgttttgaactatatgcaaattgtaatggcactggcccgaatatatgaagtctaatagcatatagaaaacaaattttagctatctaataaaatcattttttatcatacaaagtcatcaatttttttaaaaaatatatatcatcaactatattatcattatcatatatttcttacacgatagaattactcacgtttcaatatacacaggtaaattatgggaaaatattaagatttctaccttttccaatatacattagatttctatatagtaggatattgctatatatactttaattaaatattttttgctgcagttgctgcaaataaaacaaaacaaaacttaaattattgttaattttgtcatgcagacgcacatgctagctactgggagcaccaaatggcgtgccaattttctagtaagaatctaaagtagtgaaaatattaatctttctcatcaccggattatgccacgtcattagaatagtaagaatcatcggatgcaactgagattcaacagctgccgttagatcttagctagaacggtctcagtaaaaaaatattggtgaagggtttacaagagtcacagccggaaggctcgcgaatacgcggcgtccacgcatcggaactcggaaggagagaatgaaaaaaaatcgactaaaaagtaaaggatcacagccagaactcccaattggctccaccatcgtctgatcatctcctcgcctccttccgagttttcccagcgctgccgtctcttccgccgcacttttagatcatcacacatcaccgagatcccatggccatcagtgaaactgcagctgccgatggaaagacacaaggagaacagtagagatagatggagtagggaattgtgctacccgtgacatgcttaccagccaggagaagaggcactggtcactagaggtggccatagaagtaggggtgacaattttctcggtgggtgcagggtcccaacggggccgagggaaggtggagttttaactcgcatgtgaacggcgataggatcccgtaattttccaggggcgagggcggggcatggaagtaacccgcgggtcacccatggggccccggatggcccatcaaaacgcatgaactgagcctatccctagtatagtggtaggtaggaagatacaaatatagatagattggtaggtagactctgagagtcagatggatagaacataggtagatagaatgcaagaaacataaatagattgatatatagactatacttagatagaatatgctaggtcgataatcaggtaggtagatagacaaatattatagatggatcaacagaaggaacaaactgatggatagatagatagatagatagataggatgaatggaagatagtcaaacagactttagatagatagatagatagatgaattactcgccaccatagtttctataagcacactttcatagtataaatacatgtgaccccaatgaggaactccaacacatcccatgcatacaacattttgacctttttatttaagaattagagtagagttaaagataggagaagtgatcagaagtcaccatgcacacacagacgaatctaatgtttctcattgcagtcattgtgtccctcatgctttctcaaggtaagaacaaatcaatcatttcatacacgtttcatcagtcgcactatctttgctaacaaagcacttatgtatatccataatattgctccaaatgattctaattagttaatatcatcttcactaaaacaaaccattcttttctaattaatatcatcttcgtctcaggggagtcgcaaccatgcgggccatcaagcatcgacgtccagcagatgaacaccgggaagaaggtcggcacgctcgacacggtgttccgggtgacggtggagaacaggtgcgtttgcacggtgaaggccgtcgtcgtccaagccaatggcttcacgagctccatccccgttgaccccaggctattccgaaaggctggggacacaagctatgtcgtcggtgatggacagcagattgcgagcaccaattctgtcatgtttgaatatgcctggagccactacttccagatcactccggctagcgtgcaggttgaatgctaagctgatttaagacatgtacttcctttgtcgcaaaaatattgtaggaaaaataaaattgttattgttatcgccggtgaagttgcataatgattggattaataaattaaggattaattggtgtatgaccactgaaaatatataaatgtatgtttgattgacttatttaattttagaggaaaactgaagtcgtcaagttgagtactttactatggccgttaatggtagtattatactaccagtataatggccctgtttagttcgcgaaaagaaaatttttgggtgtcatatcgaacgtttgaccggaagtcggaaagggttttcggacacgaataaaaaaactaatttcatcactcgcatggaaaccgcgagacgaatctcttgagcctaattaatccgtcattagcatatgtgggttactgtagcacttatggctaatcatgcgctaattaggctaaaaagattcgtctcgcaatttccatgcaaactgggcaattaatttttgtttttatctatatttaatgctatatgcatgtgttcaaagattcgatgtgatgtttttaggaaaaaaattttgaaaactaaaccgggcctatatatcaattagaagtagaggagcactcgatagagcgagaagtggcgtgtgccatacctcacgccagccacgacctagagtagacctcccagctagggttgtcaaaaaaagctcggatctcgcaagctgcgcaagcttgattcgttataggcttgatttgagctcggctcgaatactagacaagccaagctcaagcctaggctgaggctcgcacgcctagcaagctcgagctcaaaaagctcggtagggcttgattagcataagatgcattgcatgtaaaaagatattcttgatgggtcaatgtatacttgtcacggtgcttgacctgctcaagtctcaagacctcatcaatgcttctaaataaagcaattatccggctgctagtaatagtacgactattcctattagatgtagtagctaacttttgttaattgcaacgtttcaaagccatgaatttataagaaaagctgcataggctttattcaagacaagtagcatccattaattttgactaccgataatttgcattaatatctcttatacaagagtaagttctttagagtctcaccaagtcaagctgtcaagctcgagtaggctcgaagctcgatcgagctcgaacttaagatcgatcagtatccaggctcagctcgagcttggctcaatttcatgtcaagctcaagcctacatagccaaactctctcgagctcggctcgttaacagccctactcccagcgcactcccctcttattatctcccgagcccggcacgagtggttggtggtgtctcatacacgcgcgacaatagccgcttgatgggttattgctgggccacaacgcccaaaatctagatccatcgttggcccgcttgtgtcattcaacagagctctcttgctatttaaaaaatgaaaccgaggtgtttttaaaaatggttttaattgtatagtgatacgtcaagaacacatcctaaacccaagttaattaacatttatcaatcaggtgaaaaaagttctttatcaagagggtatagaggattttcttcaaagaaattagctgatcagatactacagatagatccacaaggtttccaatttcttgtatgcgaaagcaagagccttggttagctgaacacggaagacaaacaaggagtaggacgaacagctgaagttttaaagagagtatagagttaaccctgaattgcgccaaccattatttgtcattggcagagaatgtcattttacaatgcaaggcaccatattattcttcaaaaagaaaaaataattcaaggcacaatgcatgagcctttgagctatgtataggtcatctcaataatgcagttgtaacataggacaatatttgttcctgtcatcacgtactagtggttaccatccgcactttgatttctggtagctagtccaggaatgacatgcttcaatataagcaatctatctattatattatattatattatattatatctatctatctatctatctattatttatatactaaaagtccattaaacttactacaaacgctcctaaattgccacttggcgctctaataaattagataaatcaaagaaattctaagaaaaaagcaaaagatctgacccttgattttcatttaatacggtggacccattattctttaccattagatctatatttaaacaaaaatcaaaaaatctatccataaatccctccccaccacctcctgggcctcctctcccatcacgtagtatacgtacgtacgtacgtacatccgtctgtctgtctatcccctcctccatctcctatcctctatcattctttccatcttttaattttctacctaccaaaaatccctccccaccacctcctgggcctcctctcccatcacgtagtatacgtacgtacgtacgtacatccgtctgtctgtctatcccctcctccatctcctatcctctatcattctttccatcttttaattttctacctaccaaaatttgtgatgattaaataaaaccaaacattataagcgtagattataatctatctattaatatccaaataatatattaaatttcctaccaacgctcccaagccatcacatgatactctataaacgctccaatgtcaccacatgatgctctaatgaattagacaaaaatcgtagatattcaatgctccaaagccgccacgtgatactctataaaccctcctacgccaccacataatgctctaataaattagagaaaatcatagatattctgagaaaaaaataatatgttgtctttatttttacttaaattgatggatccattattttagaccattagattagatcttgcttttagaaaaataaaaatataatcttttcatgctaatcaccatccacgtacaagagaaaatgtgtacgttcataaagttcaccaggaaaagtaattttcctggtgaactgtacgtacattaatgtatgtgagaaaataagtatgtacataaagttcaccacatacgtatagttcaccgagaaaaacgatacagcccaaagcaaaaaacccaaaacaggcatacttatagtatgatggaaaaatatacattacaaactacggaaacctttaaaactactgttgcatccgaaaatgaacgcatgagatttgtccaagtcactacatattttccttagtacgattggaaaagaaaattcaacagtcttcgaattgggatattccatgttagaggaagctaaatatattacttcctctttattttcttataacgtttgaccattcatcttattaaaaaattgtataaatatgtaaacttataaattgagattatagattttttatgataaaacaagtcatgataaaacaaatatcatttatatattttttaacacaaatggtcaaatgtcatataaaaattcaataacgtcatacattcacaatcattacgagtacttcacaaacattaaattggtaaacacattattttaggccattaaatatccctatcctaatatcccatgaacgtatgtagaattcgacataaaaaatcttaaaaaatacattccaagcggaaaatgatacatacgcacataatattatttagaaaagtaaatggtctttaaaactaggattttctataatttaaaggtaatattagtccataatcaaacacagttgaactatatcaaagataaattatactgagttaaagcacatcaaatataaaatatcaaattaatggcctttaaatgtccttacttgaaattatatatcaccaattttttatcattaaatgaactatgaacgcattataatggttatttgtagggctaaatacatcacaacacatggtgttgacatgtaaaaactatagtcataataacttttaaataattttacatcatattttatggtgcaaaatatcacctaacaaatatacaacactaatttgaatatatgtatgtaaaataaaaacaacagaatttaatcatctttttttaagtatatctaatttaattttgaaagcttttttatttttcaaaactatttgactggtgtagatatgatgtcaaaagcataatggtcaaaaaaccagaagcataaattctatgtagatatgaaaaataatatcaaaaatatttctagccactataatacaaccccttaatacatcacgataattatggtcatatatgtaaatttgttttctttgctaagacagtattggcaacaaatcaacaatacagtaacgttgatattaaagtactcatgatatattttctatagttgagaaattctgacgtgactgtaagtgcacttcaataataaataagctatagtaaataagtttcgaaaataaacaaaattttgaaattagtaaatttgtctggaacaacaagtgttaaaggcaaaaccaggggttaatcttggagattattagtgtggtatctctctttagatatatttatcagtaatatccattgatcaacctcgcttatttttgaaaaaggatattatatctatagtattaaaatttgagtaatattaattaacacaataaacaaactatgtctactctataccataaaactactctataacataaaaacaaattattttcattaagggcaccatgcatgacagtagagcatgctacacaatcagaagtaaagcatgggcgtacatatggcgggctgagatagtcccaatgagaggatacctttgccaatagagctcaacttcctatttcaggaggcaattgtctatgagggcacctataattaattagggattaaaattatgctctacgctggtctagaagggcatggctatgagaaacccatatttcaaggcagcagggaagaaagcctcggcgcctgcggtcggcttcacccaatacatgaatatgcttatccgatttaacgttgttatctgatcctattaattgatagaaaaggtatttttagaatatttagacacagatttggaaataagcgagacgtacatggatactcatctaaataacgtagatgatttttatagttaactaataatgtattaatcttattgtaatggtatgatgtagtttgatctattaaatagactctcagctttcaaaaacaataataatgataataagtatccactaaaacaatataatcgtcataagaagaggtgacaatagaaaagtgatttttatttttaaatttaggagttaccttatcatttagtatttttgagatggtataaatgtttttttattataagataatatatagtactctacaatggatatggtaagttgacttattttattattcctttcataaataaataaataagattccaaccttcttcctagaaaaaaaaagaaagatcataaatgatttcttgtagggcaaataatttcaagctaccaaatagtttgcaaacaattactgagcgatgctaatgaagaaaagttgtgaagaaatagtacttttgaagcatggcaggtatcatctggtatatatttcagtcatatatataggcttccgaaacacaacatattatatatgcccgcgcatcgcgcgggctacctttctagttattatatactaaaagtccattaaacttcctacaaacgctcctaaattgccacttggcgctctaataaattagataaatcaaagaaattctaagaaaaaagcaaaagatctgacccttgattttcatttaatacggtggacccattattctttaccattagatctatatttaaacaaaaatcaaaaaatctatccataaatccctccccaccacctcctgggcctcctctcccatcacgtagtatacgtacgtacgtacgtacatccgtctgtctgtctatcccctcctccatctcctatcctctatcattctttccatcttttaattttctacctaccaaaaatccctccccaccacctcctgggcctcctctcccatcacgtagtatacgtacgtacgtacgtacatccgtctgtctgtctatcccctcctccatctcctatcctctatcattctttccatcttttaattttctacctaccaaaatttgtgatgattaaataaaaccaaacattataagcgtagattataatctatctattaatatccaaataatatattaaatttcctaccaacgctcccaagccatcacatgatactctataaacgctccaatgtcaccacatgatgctctaatgaattagacaaaaatcgtagatattcaatgctccaaagccgccacgtgatactctataaaccctcctacgccaccacataatgctctaataaattagagaaaatcatagatattctgagaaaaaaataatatgttgtctttatttttacttaaattgatggatccattattttagaccattagattagatcttgcttttagaaaaataaaaatataatcttttcatgctaatcaccatccacgtacaagagaaaatgtgtacgttcataaagttcaccaggaaaagtaattttcctggtgaactgtacgtacattaatgtatgtgagaaaataagtatgtacataaagttcaccacatacgtatagttcaccgagaaaaacgatacagcccaaagcaaaaaacccaaaacaggcatacttatagtatgatggaaaaatatacattacaaactacggaaacctttaaaactactgttgcatccgaaaatgaacgcatgagatttgtccaagtcactacatattttccttagtacgattggaaaagaaaattcaacagtcttcgaattgggatattccatgttagaggaagctaaatatattacttcctctttattttcttataacgtttgaccattcatcttattaaaaaattgtataaatatgtaaacttataaattgagattatagattttttatgataaaacaagtcatgataaaacaaatatcatttatatattttttaacacaaatggtcaaatgtcatataaaaattcaataacgtcatacattcacaatcattacgagtacttcacaaacattaaattggtaaacacattattttaggccattaaatatccctatcctaatatcccatgaacgtatgtagaattcgacataaaaaatcttaaaaaatacattccaagcggaaaatgatacatacgcacataatattatttagaaaagtaaatggtctttaaaactaggattttctataatttaaaggtaatattagtccataatcaaacacagttgaactatatcaaagataaattatactgagttaaagcacatcaaatataaaatatcaaattaatggcctttaaatgtccttacttgaaattatatatcaccaattttttatcattaaatgaactatgaacgcattataatggttatttgtagggctaaatacatcacaacacatggtgttgacatgtaaaaactatagtcataataacttttaaataattttacatcatattttatggtgcaaaatatcacctaacaaatatacaacactaatttgaatatatgtatgtaaaataaaaacaacagaatttaatcatctttttttaagtatatctaatttaattttgaaagcttttttatttttcaaaactatttgactggtgtagatatgatgtcaaaagcataatggtcaaaaaaccagaagcataaattctatgtagatatgaaaaataatatcaaaaatatttctagccactataatacaaccccttaatacatcacgataattatggtcatatatgtaaatttgttttctttgctaagacagtattggcaacaaatcaacaatacagtaacgttgatattaaagtactcatgatatattttctatagttgagaaattctgacgtgactgtaagtgcacttcaataataaataagctatagtaaataagtttcgaaaataaacaaaattttgaaattagtaaatttgtctggaacaacaagtgttaaaggcaaaaccaggggttaatcttggagattattagtgtggtatctctctttagatatatttatcagtaatatccattgatcaacctcgcttatttttgaaaaaggatattatatctatagtattaaaatttgagtaatattaattaacacaataaacaaactatgtctactctataccataaaactactctataacataaaaacaaattattttcattaagggcaccatgcatgacagtagagcatgctacacaatcagaagtaaagcatgggcgtacatatggcgggctgagatagtcccaatgagaggatacctttgccaatagagctcaacttcctatttcaggaggcaattgtctatgagggcacctataattaattagggattaaaattatgctctacgctggtctagaagggcatggctatgagaaacccatatttcaaggcagcagggaagaaagcctcggcgcctgcggtcggcttcacccaatacatgaatatgcttatccgatttaacgttgttatctgatcctattaattgatagaaaaggtatttttagaatatttagacacagatttggaaataagcgagacgtacatggatactcatctaaataacgtagatgatttttatagttaactaataatgtattaatcttattgtaatggtatgatgtagtttgatctattaaatagactctcagctttcaaaaacaataataataataataagtatccactaaaacaatataatcgtcataagaagaggtgacaatagaaaagtgatttttatttttaaatttaggagttaccttatcatttagtatttttgagatggtataaatgtttttttattataagataatatatagtactctacaatggatatggtaagttgacttattttattattcctttcataaataaataaataagattccaaccttcttcctagaaaaaaaaagaaagatcataaatgatttcttgtagggcaaataatttcaagctaccaaatagtttgcaaacaattactgagcgatgctaatgaagaaaagttgtgaagaaatagtacttttgaagcatggcaggtatcatctggtatatatttcagtcatatatataggcttccgaaacacaacatattatatatgcccgcgcatcgcgcgggctacctttctagttattatatactaaaagtccattaaacttcctacaaacgctcttaagccgccacgtggcactcctacaaacgctcctagaccgccacgtggcaatacttaatctcaccgtcgattttcacttaaatcggtggacccgataatttagaccattagattagatctatttgcatcctcctaatatcccgtgcatatgtgtgaaaccgtttgtaccagaaaaaacttacgtacgtatctatggtagggacaacccatttaactgttcatttgaaaaaaacgctcgtacgcaccttaaaaaatattaaaaagatgctgttcatatggaaacaagtacgtaaatatatgcacgaaattttaaatttaaacaaatgcgtacttatatgaaactatatttcttacaattaaatttaaattttaagactaatattaactaggtttttcttttaaaaaactacaaggggagaaatgtttaggatatgtatatgtacacctttttttattaatttctgtgtaacaaattgcgtcaatgcaaatcaattaagggcagagcttgatagtacaaataaaacactatgattaaataaaaatacatttatttattcataaaagtttttcagtctttttatagaaaaggtaaaaacaccttattttaatttacacttaatttattagacatatgctccaaacaaactaagtatacctctttttttaccctaaaaaatgtatacatcctttttttttatgatgaggaagattatagacaattgtttatatggatgaattgaatattatataatataaatcttaagtagagcttagaaaaattatctaaacaatattgatgaagaaaatttatggagaaaacatactgctaaagcttggtgaatgttgctcaattgatattccacccttataaatttttcaaacacatcctagatgcatacccgcgcgaatgcgctattaaatttcctaaaatgttctcatgccactaagtggcaccctataaacactctcgagtcgccaagcggcactataataaataataaatcagagaaatcctaccaacgattttgttggacccattgttttagaacattagatctattttattaaagaaacagattcggcacaaacgtaaaaaaacaaaattaaaagttttggcatgttatacgaattaatgaacgtatgtacggtacgtacttccctcctgttccttagtatattattttctctcttcacgagaaactaaaataaaaacatttttacaggcaaaaaaatcccacaaatagacttctaccaactagctaggtctagaagctctccctctctccctcgatctacatatgaacgcaataattctaagtcgctacgtggtctataaaattagaaaacgtactaaaaaatatttataaaaaacaaagcaaccagctatcgatttctatttaaattgatggatacattgttttagattgttagattttttaataaaaaaatcgcaaacctctctccctcccttccaccccgtgcggcattaaaatccattaaacattttataaatgcttataaaatcttagagattctggaaaacaaactaatccattaaacatccttaaattgttcctaagccacaaagtgacacgctacaaacgctcctaggtcaccaaggaacactctaataaataaaaaaaaatatgaacaacgattttcatttaaatcggtgaatccattgttttggatggttaaatcgtttttttaaaagaacacatacatccagaacctcgccatcacataggaacgaacatgcatacttccctcccgtttctttcagttttatctatcttcatgataaaatgataatcaaaattatttttacatgaaaaaaaagcccacaaatagacctccacctactacttggtctagcagttctccctctatcacttaaacatcctacaaactgaaatttcttaccttttcatccttttcaaaacttattttacaaatagactcctcgaaaaacttattacaggaatgggcctattttttttgcgccagagaggctggcaccatcctccaccctagtgccagccaccctggcaccgtcaccgtgtcaccgtggcactagggcacacgtgagtgggctgacatggcaaagggaggcgccacgctggcgcctccgtcccacacaccacggtgctagcatggctgccgcgctccccctgggtgggccgcgcccttaacccgtgcgggccccacctcctttctcatcccccactcattttcgccaacttaggagcccgagcacgcagagaagcccttctcccctctctctctctcccccctcatctctactcatcaaatccactcaatttgaagtctttttcataggttttttttggaaatcgaagataaaggtatactcctccattccatccttttttttcgttttaatcggttgcatttgtagatcggagggtacccctagaaacccttttaactataaatataattaaatttgaatcaaataaaaattgatatcattggatttatttttgggttataagctatccttctaggaagtcaaaatatcataaattttctcataggaaccaactccattctttcaacacaatatttttttataaattcaaaactgcacgatgtcaagtaattttactttagaatttatatgttgcaagggtaattataagaaaataatcagcattcaaagcatactaaataagtttatttttcgtttagtacatatacactaaacatttcaataaaaattcacccccacaaatttcacttgcattatataaggtgcccacgcatgtgcgcgggctatctttctagttatagaaggaattgatcttcatacgggttaagtagagatgtgcattaagtcttacctccatcttcaccaaaattgccagctaaaaccgcccaactaggtgacaattacatatgggtgctaatcaaatttctctttaaagcaccatcatatataaatagaagttcacattatggaatatgtacaacttttaaatggttgtgatagtaaatctgtcacccgaaccattcttattgtaaattttacaaatcactgcttgaaattcttaatattaaaaaacaaccaaagctaaatggatagccacagataaaataaaaataaggcaaaaatttccataccacaagaatgggcagcacactttgtgaaaaatatattttacccgtaggaaagcacaaacattgaactgttaagtttttaccaagaactattttttttccctagaaataggagtacagctttccaaatttcctggtctctgacattattccgagacaacaatttcaccatcatcactacactctacaaataaagcccaatcccctggaaatccaaccacaaacactgcaactgcaaacaaaaaccatggaatcgaaatcgaagcctctccttgccctcctctgcctcatgatcgccaaaggtaatcaatcatcaaaacaaataaattatcttctcatcacaaattcacaatgtccctcgatctcttctagcaatcaagaaatcaaatcctcacattaccgttctacttcctctcatcacaaatttacaatggatgcatcgtgcatgcatgtctttgtatacggattaccaggcaactgcgtgtgcttgcgctgcatgaacgacttcgtcgtcgtcggccagcagctggcggagaacgatcacggcgagctcggcggcggcggcgacgagcacacgatgtacacgttcgaggtgacggtgacgaaccggtgctgctgcgaggtgagcagcgtcgtcgtggcggcgccggggttccggagcgccgtcccggtggagccgaagctgttccggcggatcgccggcggggaggagaagggctactacctcgtcggcgacggcgaggcgatcccgaacaacgggtcaagcgtcaccttcttctacgcgtggagcaccgtgttcaggatggatgtcgtcagcatgactgtctctagatgccggtaggaggattgcagtcaattcatggatgtttctaattggatggatgtagtgatggtttgatggattgatgaaggatgatgtaagtgttgagctgaatttaattaaagctactgaataatttatgaaaagaggatcatttgatggcctgtgtgacacacacaatcaagccatccaggatgagtgagtgatctctatatatatcatatcattaatgcactaaatttcatgaaaccaactaatgatttcattcctcattgtttcatttggtatgttaatagcttttgtaacgcattgattttcaggtcgttacaaaattgattttaataaaaaattctattagcaaaattttggttttagagcaggtacaatagcaggctattagccagctctaaacatattgtaatgagataaacgatgagagagaagagaagcaggctgcaaatctgtagccagctgcagcatggactccaagacacactgtgtgtatgacaggtgggaccatatattaatagtatagcaaacaactattgtatgaattgactatttgattggctatagatgaattggagctagtagtgggctgtactattagactcgctcttagccatagcgccatcgctcatcgcagagacgcgaacttgcggtcagccaggcgtcaacgctaatgaaccagtgcatctcgtggactccggcgtcgcctcgattgcgcagcatggcctgcatgccttcctgccaatcgtcgatgtgcttggcaccacaccatcacttaaattggactggcgggatgtgggggtggtgacgggtatgtcattgaacaacctgcataggccaagaactttcatcccaaatcacaaaaactttcaatttgatcctaaaactcttatatcaaaatcacaaactaactttcaacatgaaaaaacaaaattttcgtctcaaataagaaaataagactttcaattgaagatatcaaactttcatcgcaaataaaaaaaactttcaattcaaatatgaaatgtttgaaaaccaattcaatgaaaatctaaaacttttatctaaatacccaaaatcctcttctcctagcctcaatcgttgggtgcttcatgcccctcactgaattctcctcaggcttcggggaggtcggcactcgacacaaggtagatgcagtgtgtggcaatggcagggatagatacggtggagtctcgtagctagagcagtcactaatgccaacatggttgaccctagtactagagtttaagcccatagcatgaagaaaggtgatagagggatggagggtggctagaggctgagatgggaatggggaatttcgacgccaataagatggggaatggaaggcgggaagtggatatgatggggatgaattttcgatcgccgacacattcgttgggtggtttgtgaacatgaacggatagagacacgtggacgagctgagaagatgatgtggaacttttgttcactagtctttccacctcccagactatcaagcattcagacttaatgggccgatacaatgtgcctgcaggtgcatatgtgccgaataggattcctgataaatattactatatcagtttttatggaatacaaaactgtcattctcacctttgattgcccaacctaattgacttggtttagggcatgtttggattgaagccaattcttaccctaccaattatttggtagttttgaatactacttgttagctatttggattgaggccaagtcttaccaattcaatagatttagaaaaaacacaaccctaccaaaattttggtagtgccaaaatttaaatttattcaagatttgacattaccaaaattttggtagggcttcaaacccaaacatcccttcatttcctacgttataataggcccaaataaacaggcctagagaaaatcgagtatctaactcggacgagtggcccatctaggtctagctagcataggtttgtgctactcgaggaattcatgtgggcccacagtagagagaaatcacacattagcagtttaggattcattatactgaacggatgaatcggatggtctcccatcctttattaatccctatgtccatactactataacctatatgcaacataaataattttttagggctaatagcaaaaaattaaaaaaaaataaacttgagaaatccagaggagaaattaacaattaaatctgtgaacaacgaggaaccttacatagagggatcaaaagttttaacacatccatccattcatctcacaataacaaaaaggacacgcatctcccctcacgttttcatgaggcaataatcaaatacctaccgtgctgtgcttcagtagatgcaatcgcctattggcattcattgtcacggctaaaattgtgcgcgaagtcagttttcgtcctttatctttatatatataaccaccgccaccaagaccggcacacgtcattctgtactccctttcttctgagagataattcttgaaattcttagccttgtttttcgttcaggtactacttagtttggtaaagagagtattaataaagtagctcacgaaattgtgtttttagcaaagagagttgttgaggctgcgattttgcgcctggactcttactgcctatgaactgctcagctcatattgtgtaatcctcatcagttttatcaataatacattctctctttcacgcaaaaaaatattacccaattaattaataaatgccaatgatgcgtgaatatatgcatgattacatacagctaattctggaaggagttgatttccatgcacagattaatttgaggtgtattaaaattttgccactcatcatgaacaactatgtcagctaaaaccgccgaaataagcaacaattatgttttggatggaaagtattatcttttcggagccatcataaaacactgacaaaagcacaaaatgtcaatggacaggaaaagtgttaaccaagaagtattattttccccaacaaatgggaccgttacaggcaaatttacagctttccatattttgctggtctgacattattcacgcacaacaatttgaccaccactacaaataagcccgaccccaagtaaataattcatacacaaacactgcaagaacgaagcaaaaaaattaacatggctcaagaatcgaagcctctcgtcgttgctctcctcctctgcctcatgatcgccaaaggtaaatcaatcatcaaaaccaaaaaatcatcctctcatcacaaaattcacagtatcactatctgctagtaataatcatcaagaaattaaatcctcacattactactgttcttcttcttcttcctccggatgcaccatgcatgtttttacggatcaccaggcaactgcctctgcatgggctgcatgaacgaccacgtcgtcgtcagccagctcgccgacgaccggagcaaggtcggcggcggcggcggcggcggcggcgcgggcacgctgttcaaggtgacggtggccaaccagtgctgctgcgacgtggggcacgtcgtcgcggcggcgccggggttccggagcgccatccccgtcgaccccaagctgttccggcggaaccccggcggcgatcgggagagctacctcgtcggcgacggcggggcgatccgtgccaacgggagcgtcaccttctactacgcgtggagctccatgttcaggatcagcgtcgtcggcatgactgtggcgaactgcctgtaggattacgcagggaaaattaattgcttcaaatgggatgagtcatagtccgtgttcaaaaattccggaatgaaatttctgaaatttttaacccccccaatatgatatttttttcggctgaattttttttcaatttttttgaatttggcaatattttgttcaaatttgactaaatttgttcaaaattttcagaaatttcagacccaatttttggaaattttggtatattggcaccctccgatagaatccaaaccaaaagattaaaccctagtcatagttgaggagaaatttgataatctaacacttttttcccaattgctttaaccaacacttgtgaggatgacatgtgggaccttcctgagtaaatgaaagtggccaagatgtaaaataatagaagcccattttaaggagtgttaaattatcaaatctctttatgtttgatggagtcattggttagtgcacatttcctcaatgtaaaccattttcgctacattgaaatgaaaaaattggaaacttttggccggacatacacttcaataattttaaagcgaaatttcaaatgttgcctcccagccccaaaatggatcagcaagaaaagacacgacatggtatcatatctaatacttacacgtatcatgcatgtttcctggttagtatcatcatatatgacatggtatctaatattgttacatctagtatccacatgcataagagtaagtatgtttcagacctaatacctatatataccatgtacgtagatattatatttagtacatactccctctgatttttaatgagtgacgatattgattttttaagatatgtttgactattcaacttagttaaaaaaaaagtaattttatttattttattgtgactcaattcattgttaaatgttctttaagtgtgtgtcttaattctttttatagttgtgcacaaaaattgaataagacgaatgattaaacgcttgtcaaaaagtcaacagcatcatgtgttaaaaaaaagaggtattataaatatcgcacttggtattagatcattattcataggtaatatagcatgtaggttaggtattggatctaatacctacatgtaaataatgatatcttcgagctatcaccaaggttttgtgatcggtattataacaacctttttaaggtttagtgatagtatcatagagttatcatcaagatatttaaatacaaaactctcattgctaatggtccatatgagatacgctctcaaactagtagttagtaaacaagattggcccaatatgtaaaagctctgcgtcgtcctcgcgcgagcggctcggggcgaaaccctagccgcccaccgccgcccctcttctccctctcctttgcctctccaccgccggagcacgtcgcccggaaagccgggcggcgagccaggatggtggcgacggggctaagccccatcgacgctccgcctcttgcgcgagagaggcgaggaggagctccgcgaagacgacggcggcgccagcgagtccccggcttggggctgcaaatccggtgccgccgcgaccggatctggcgctgcctcgatggattcagccgggggcacacagccggcgtgacgggggcgacgggaggcggcagcgagagacggcgcgagcagcggtgggtgacgggccagatgcatcgtcgttcggcgcggctgagggaggccggcatgccaaggccaagaggcttgcacggccggcgccgacagcaggtggaggtggcgtccatggcttcggcatgcacgggcgatgggtcggacggcgaccggctaccgtggaccatgggcgactgacagccacgccaggaggatgcgtgctgcagtggcaggcgtgggagctatgcctgtggtgcctggcgtggcagccgcgcgggagtaggcgcgggagcggccggcggaggaggaggacgtcgtgggagatggccaggaggacgtcgtgtcccgcgagaggccagcacgcccggcggcggggagagggaggccggtgcgtcccgacagactgatggcagcgggtgctgctgatggcggcatgcggcgactggccggtggggggcgccggtgcagtgatgcccgcacaccagcagaggctttgaagacggtggagcctcggggcgtcaacggtggataggcaggcggcagatggcgggtgaaaacccagccccacctcgggcaggccggcaacggcaaaaacccagtcaaggttcttctaacctcgatggtcggcggcggctgtactttcgtcatttctctccctggagacgtcgtctaggcaacgcccttgccgaaaccaccgaaacaactgttgcaagctcgttctagagtctcttccgcttgtatcggcgtcctagtttgtacaagttggccacatcggagggcctaagggggagagcggttccattctcctctctcaccctctctccctgaatccctgcgatgtggatagagcggggttttgtgtcggttgtaaggcttgggttctggacgatcccttttgtagcttatttattggccttgcggcggtcggtcacgcttagcggcggccgatctggtgctggctttctcctgggtttgtgtttggcgctgtcagtgtgtggtaggcggtatacttttttcttttcctggttacagccttccagggttgtaatcttgtattttttttctgctctatccactagtagagaaaccatctttacccagtcgaccaaaaaccacaatagtctcggacgcagtaaaaatcgggactaaatatggttttaagtcccggtttataagtagaacaggactacgtgatctttagtcccggttcacatgctgttaggtgttgtcaggcccctccaggatctttagtcccggctggtattacaaaccgggattaaagatcaaaacgcactatataatccctattacttatcatcttttctcatccactcttttctcatccacaccaactcctctctccctccatctctaatcttatctcttcccttcctctttatctcttttccttcttatcccttcccaactcgatccggtgtgcgcagcaggagggggtgggcggcccggccggcggagggcagcgcggcggcggcgcggcggcggccggggaggaggggaggcggcagccggctcagccggccggcagctttgcttcgttttttttcttttttttttcaaaaaatttgtgatccatgtatagattgtgatccatgtatagattgagaagaagaatatgtggttcattgtatgaattgagatgtatatattttttttggaatctcattgtatggatctgagatgtacatgattggtgtatgatttgtgtatttgggatgtttctttgattaggggtttgatttgggatgtataatctgcagtgtatatgatcattgatttgtgtatttggaatggtactttgattttagggtttgatttaggaatacgcatcccacctaatttgggagaaaataaattagagattaaatagtaagtaaatgaaaaaaaaaaactattgcccactcccatctttagtcctggtcggtaacaccaaccgggactaaagatcgatcttcagtcccgggtatttgaaccgggactaaagatccctatctttagtccctgattcgtagtcccggtttggactatagggggttacgaaccgggactaaaaacgatttctccaccagtgatcaatatgaacttcgcactgtcgttaaaaaaaaggattggccctataggcttaactaatgtccttgcacatagctcacgaggaaatatgcgaggtacttttgaaccatatatatgaacatgtacagttcgttatgtcggaccggtctcacgtcgcatattgtactcccgaaaaagtaactgttgtggccatgtgattttgccagtaaaaagaatatccaaatctcagattgaagttgtaaacaaaatcatccaactattttcccttgtagaaaattccctgttagatgcaacaattctgatttgtgtggcagcttgattttcaccatatatatatatataaccggatttcctacctattgagggcagagtagcaagttgaggtgcagtggtacttgaaggcttttgctaatggctagtgtgtttataccgaggacagttaattcgaataaaaaggtgaaaaatgatgtttaggatagcatttagcataccaaggggtgattaattagggggtatttttccatgtctgcccctattaaatagagttgtgcgtagcgttctatacaagaaacaaacttaactcaagcggctagtgcggcaaggctggagtcctcgggacccaggtttgaatcctggcggggcacctttttttgtctggtcgcttgattttacatgggagacgaggcgagcaggcgtgctgcggattaattgcaggagcttggctatcgaatagacaaggacaagggcaatcccgtccacaaggcctggctgcggttcagaacgtctcaaacgaggttagagcatccccaggagatacgctactacatcctccatccgtgatttggcgtataggagtgcaaaaaccgtctccaggagatgcgccatccaatccgccaaaagtggcagatgtgccaaaaagggagagagaaaacccaaaaatagcgtgtctctctcctcacgccaaatcataacgaccgagctcccgcccccatctggaattccgcgacgtcccctccgccgcgacctccactccatcgtcgtcatcgccggccggcgaaggggagtacgccacgcccgtttttgattttttatttgcaacggagggtggagagagaggggtgtagccatggagtgagggtggaaggggataggcataccagatctgggcggagagtaccagcagcacccaccgccgtcgccctgcctgctgccaccgcctgacgccgttgccctgcacccgtggatctggcggtggaggcttggagtagatgcggaggcccgaccgccgctgcctgcctcctccgcccctcgcccaccgccgcctgtcgttactccgccgccgtgacaccgccgcccgcgagacctccgcccgcgcccatgtcgctccaccgcctgtcgagcctgcctcccgtgcccggagctcctccgccggcgaccccaccgcccacgcccgtgaccccgccgctcacgcctcaaccgcccgtgcccgcgaccccaccgccgcccctcaccagctcgctcgcccctcactagaagaataaagctgagggaagagaagagtagcagtagagagagcaatagagaagagtagaagagtagagaatgttagttgaaagatattattaaaaaatagaaggatgtgatatggatgacgtaatatagataatctgttggagtgggatatataggatattaatgagaaatcttttttggatggacatccatatgggcatatggaggatgatatttggatgagctgctagggatgctcttaggggctagaacgacgtttttttcctatacggagggagtatatgtatggggtatgacccgcactctggccattttatcaaagaccctcactagctttcatggcaatagacagccactaaaaattaatgttcttatcgcatacaatgctgaataaaggacgatatagtatgatctcgttgcatgagtaataataatagagtatatataacaaattaataccacgagtcgcagcagcagcagccaccgatgcaatcatcatcactttcagaactagacaccttaggaggagggctgaagagcctgaaatccttgatcttcaaacacttgttcctcagctcctcctcctcgtccatcctcaggtaggcgacattgataacatcaagagatcgcagcttggggcaacagttcagtacactcaggatgatgggcttggtgaaggtgtcaccaaacaaggtgagggatctcaggccgtgaaagcttcctggctctcatcatcatggtagtatgtgctcgctaagcttttatcggcacatcttatcgcgaaggtcttgagatggatgcaggatttcatggccgactgaaggagatgcgcgaaatcgtagcttggacgcgcaacgtagtagaagctgcatttgagcacaagctcaagctccttgagcatggggaacttttgtatcacattggtgagcacttgacatgacacgtcgtagtgtgtactcacacggaggcttttcaaatatggagccctacaaaattaaagagcatcggtattagatttagatagtaagcacactaggtatatggtattgatgttatattaagcgtgtgccaaagaatttataccagtgctttcgattagtgataaattaatcatgtattgcatattctttttcaacaacgagccatacagatcaaaacagttaaacctcgctccatatgttacatacaataaaataaagtttaattaaacacaacataacgcaaacatgattaagtccaaagccacacagtaagagaaattgattaaagcttccctcgtcaaaactgcacctagaaaaagcgtacagtaggtactgtgcatattgttaaacgcttactactacttcattcctaaaatatagttgttgggaaaattgatctctcggtttgaagaccgagaggagatcacgctagaccttttccacccgttgtctatgcgcgatcacagctatccaatctgttaattcccgattaactacgcgtcatgatcggtggcgcccaattatttccttttgagtcacccccgattccctacggcgctaaatataaaaggagaggccggcccaagagaagatgatgatctctctcggtctcaatctccccgacaaccaaaccctaagccccgatcaacattggcgctggaggggatcgaaacgtgagacggttcagggacaatgtaggtggcgaccggaaggccgccgctaccccgcaagttatcgccgacgaccccttcggatcaagccggcgtccctactgctaccgctacctctacttcccctacacataaaagcgaggaggtggttcgaggttctcgatcctctacttccactccggttgacaacaaaaggagaatcgcatccatggcttcaaacaacggtcagtgaaacctaagaattccgcattaaggatgatcatgcttaggcttatttgtttattaagttttgtatatgcaataaaaagaacaaacaaaaagagtaaagtttacaaagacccatgtattttgatttaggttgcacaaaccacttatattttgacgtgtcacaccacatgtaatatattataatactatatatttatcataaaacacaccgttaaccaatttttcttagatttggtatacacatgaatatattctaaacttacacccaaaatttatatgagttggttcaatccatcgtctataaacgttataccaatcaaagtaaatactttttcatatattgtgcaaaatatattgttttaattaagttatagtcaacaacgggtgtagttatctatgtgatttactgtaaagaaaattgcgtacgtacctatcggagaggtaaagcagaagcttgtcgtcggcacgtcctatagatggccataaggcccgcccggcacggcccggcccaggcacggataggcacggcccgagagcgatcgggccggcacggcccgattggaatttcgtgccgtgccgtgcctgcccatgggccgcacgtcaggcccaggcacggcccagtagcaatcgggccgtgccgggccgacacgaaggcacgatcagcccattgggcctgggctagcccaggcacggcttaggaccagtggatcagtggaccagtaattcagtggattgacaaattcaatggatcaatggattgaacatgcaaaatttaaatttaaacatgccttagttaacaaattcaaatttcacaacttacttgacaaattcaaatttgaacatgccttagttaacaaatttaaattacacaacttagttgacaaatataaatttgaacatgccttggttaacaaattcaaataacacaacttacacaacttagttgacaaattcaaatttgaacatgccttagttgaattcacagttctagattcacatatcacctttacaaaaattcacagatcacagatcaaagattcacagatcacattgacaaaaattcatagatcacttgactaagatcacatatcacatggacaattcacagaagagtttcaaaaatcacagactcacagttgtagattcaaaaatttcaccaagtcaaattacccaaaatcacaaattttcacccaaactttcacccaaaaaacttgacttagatcacagatgacatggacaattcacagaaatcacagttctaagattcaaaagtttcactaagtcaaaaattacccaaaatcataaactttcacccaaaaacttgacacaagtatttcaatgaataaagtagctgtgtagtgcaatggctgcctcgttaaaaacctttctaggtaaaaactcacacctcgtgagaaaaccctagaaaggaaaaaagagtgcagcccacagcattaatcaaatgttcataataaagtccaagtccaatacaatcatccagtcccagtggcagtggttacttcatcaagaaacaaattgtcaaaagagtttataagctctaaattctccatggtatgttgcatctttgcatctgcttgctcccaatctttgattagtgccaaagcttgcaccatgtcaggagctagacgccgtcgtcgctcctcgatgatcctgccagttaagctaaaagcagattccgatgatatagtagaaacaggaacagtcaaaacatccctagctaatatggaaagaataggataggtgtggttgtgctcatgccaccagttaaggatattgaagtcatcatcgtattggttgacagtgtcactgtcaagataggcaaacaactcagatgcattcatgttagcagtagaagaaacagcctgaatcaaagcggtagcagaagttctcctagaaaatgcaccagcaccaagtccagatcctgcactggcaccagcatcaccaagtccagaacctggactggcactagcaccaaatccagaacctggactggcaccagcaccaaatccagaacctggactggcactagcaccagcattaccagcaccaagtccagcaccaagactggaaccacaagcagcagcaccaaaaattttcccccaagctgtctttttcttaccagaagaagagcttggggttgccctttgtaatctcacagcaccaaatttactttcatacttagcatacatgtcagacaatgcagccctaacctcatttaaatatgcagagtaatcaccactaataagttgtcccataatttggagaacattgctaaaacccctgatcttggccctaggatccaagataaaagcaaatgaatacagaaatggaatctcagaccagtatgacaagaacttatttttcatgggaacaacaacatttctaaggttccaatcattctcataagtatttagatgtccagcaatctcaagaatgtgatgcataattaatggagatgttggataataaacaccagacaaaataacagttgaatcataaaattgttcaaggaataaaagaacagtttcagcaattgtccagtgtaaatcagtcagtaatggctgaccatcagccattggatggtgagatgcaataaacactgaaaaaatgaccctatgtggcaagagatgcttaagcattagataagttgcattccatctaacatccatgtccaaaccaaatttacgaggacgaatacctttagcaatgcagaagtttttgtataaagcaatgcgctgattagatgcatttataaatgaaatagcagttctaaaatcttgaagcatgggtttgaagatttctagaccagccttaacaattaaattgatgatatgacatgcacaacgctgatgcaaatataaatcaccaatataaccagacagagcaggtttaagactatccattgctttagaattagcagaggcattgtccagggtaatagagaagatcttattagtcaaaccatattcttgaacaacagaaagcacacgttcagaaatattttcagcattgtgtgacacatcaattagcaccagtcccaaaatcctcttctctaattgccaattagaattaacaaaatgggcaacaacactcaaataatcctccttagcattaccagaccatatatcagatgtcaaagcaacagagctaacagacttcaaagtatcaataagcatagcacgtctcttgtcgaagaccttaaaaacgtccctactgatagtttgcctagagacaacactaaatctagggttgtgagcattctgaatatactcctcaaaagcagcagattgaccaaaagtaagtggaagatcctctctagcaatcaacctaaccaactcagttctagccacatccggtttatattcccattgactaacagaaccatcagcattaaacctaagcatggactgagacaaagcaccaacatttctaggtttgcacgatttaatatgcctaagcaaatgtccagtaccaccagttgaacgagcagacaatgttttatgacagtaattgcatttagcagaaacgcgaacctgagcgccattgcgctcttcaaagagttcttcaaagtcgtcccatacctcagacctggacctcttgttgctagcacttgagccagacggagcaccgttgccatcggcaccggtaccatcatcgtgtggctccggctgcgacagatctctcagaggtgaagcagtgttgccaaacacctcgatgcgttcctcctccaagtcatcttcgtcatcaccctgcgtccccatcaccctcgcctcgtagttgcatgaggttggatcaccatccatcgcaggcactccggttcctcaacggtggctgccgcctgccgctcagcgacctgcaagaacaaatgaaacaacgacgagaacagagagtagttacggatctgatcgaatagagaaaataaactaaaaaaaaagcttgtacctgcgcatccggagcaccggagttgccgttgatgatagagatccacagatctacgagaagacaagaggagagactagatttggggggtggatgagtggatctgagtatctgacgaagagaaacgatgagggttgcaaaaaaaaagtacagaatggagaggaaatcgacaatgcgaccgtcgatccggtgaccggagaggcggagacgaagagctcacggtcacagatcagccaaagagatgaaagaaaaggatagagaagagacgaccctcaagcccccagcgggagcccgctgaccctcggtgctagatccggcgaggcatccatcggagacgccgacgaagagggatggaggcgtggagggctgaggggtcggagcctggaggtggaggcggagcgggcgagcggcggatcggtcgagactccagactgatgtggctagggttagggtttgtcggtttgatgcggtttggggtatttatacccacccggcataacaggcctcggtcgggccgtgcctgccgttggaccgtgccgggccgtgccggcccaccgtgccgacctctttcgtgctgggccgtgccggcccaccgtgccgagggagcggcccaagcacggcccggctgttgggccgggccggcacgggcacgaccccagtcgggccgtgccgtgcctgggccgggccaatttgtcgtgccttgggccgggccgtcgggccccgggccttatggccatctatagcacgtccccagaaagccacgcattcgccggcgcgcgccatctctttccatcccttcggctcgtactcgtagtcggcggattcttttcttggaacatcgtcgtcgtcgtcgtcggattcctcgacgtcgacgaaggcgtcgctgaaaccgaagaagtcgtcgtcgctgctgcggttggactgtacggaggcggcatcatcgcctttgttctccgcgtcgtcggagttggattcctcgacaagggcgtcgctgcggctgccatcttcgacgggaacggagtagccgtcggaatcgtcggcatcgtcgtcgtcgtcgtcgccgccgtcgctgaagctggagtcggcgccgtgcgcggcgacgtcgctgtgcaggtcgatgcggcgccacagcgcgggctcgtcgcgcgcggcgcggcgccacgaggagcacgccaggccggcgccccggaggatctcctcctggccggccgcggcgaagacgctccacaggaggtcgctcggcagcgccgcccagtccttcgacgccgccgccgccggcggcgaggcggcggccatgacttgctagctagctagggtatttttgttgacgcagagcaccacgtgtctacgtcttcgtgtcgcctcacaaggcgtgcttatatatacaaacacgtggctacgcggaatcctaattttgtttttttaatcagctccctcccctccatattataagtttcatattataattcgtttgattttttttcaaattaaacttctttaaattgaacaaagtttataaaaaaatattagtataaaataaatatattatcaaaataaatttaatataagatatttaatgaaactaatttgatattttagatgttactaattttttctataaatttggtcaaacttaacaaagtttgactagaaaaaaccaaatgatttgtaatatgacacggagggagtatattctaatcgtgcgtgtcactgaatgtgctgtatcagaattgtattagaaacagggtttgaatctttgacgtatttttattttagagctagagcgtaataggagcaattcaatactcacgactttgacaacattcatatggagtacaacacatatcagggtttgcattacgtcggtaaccgcgcggtttttgcggttaccgcagggtacgataatagaaaaaccacggtaacctccttaaattcaaataaattttaaaaataattttaattttaataaattttgtatggttttgtacggttttccacagttatcgcggtaaccatacttaccgtggcatggtaaccccggccggcggtttgggaaaccctacaacatatacttcatgagaaaatcgaaatatcatcatgaactgacaagtgagcattggcatcgcaaaattcaccccttttgtttgacgtgtctaagagattgcagcttggggaaaaccgtggaggatccacctattatatgagtctaattcaactcaagtggcatgtgttttcataaaactttagctgcatatctccgctatatacatgtcctgggtataacacctaccaaacattttagttgaactacgtgacttgatttagaatagctacattagcgcaagctgagttgagttagataagttacattagcacaagttgcactaacaggggatattttggagagcaccaactagaaaatcagaagtaactaagaataaaaccaacatcctaacaacgcatcttaaaaaaacagagtgaagtgaaacaaaagaggctatcacaacattctgcacgctgtttaacaacagggcagctaacaggtagcttaaaatcacgagcttacagccacaaaggcagctaacttaacctcggatcatacaaccagttaagtacttaactagagataaaagttattggcagatgtaacgcatgccttcacctactttcatggttcttatttttcccccacaatctcagccagctcaccaatcttacctagagttcagatcgagttctcctgatctgcgccagtcctcttgcatatcagagttcccattctcaggttcattttcatcattaaggaaatcttcagatggatcttcatcgtccctttgagcatttccccatccatcttcaccttgctcttgcatcatctcatgactagggccatcttcgccttgggacgctgcagcatgggccctcaaagggccatgacctatcatctccgagtgcgcttgggcctccgctcgagcttgttcagccattgccatacgcatcttagcttcagcagcctcacgacctgctttctcccttgattctatctctgctcttagccccatcatagcttgcttttcctccattaacaaagcctgctccagcatgagccgctcctctgatctgaactcgccgatggctcttttcttggtcattatattgtacgccaaaacttgtttctcaaaagtagttgtgaactcagcaattttgaccagaatgttatgatcccattgctgcaggcgcgaaggaatctgtccagttgtatcactgtcaaggattctgtcatcttcttcagcctcatagtcagcaaccacatggtagggtagtagcctagtatgcacaatacataagatggtatcagtaacttcagatgtcatgaagcgatcaaataatctaaaagtattgaaaccgcacatttgagcaaataaactcaatccaagttatctgccaattcagaacttatgctcaaacatggcatatttgaaaatatctaagatgaaaaatgttcttgaaagaatggttgttaacattatcctgtcagaaggatttatataattgaattctctgacatgtaaagtgaaaatcattgattcccatagttgtattttcactgacagttgatgaagtgcacccatacaggaaaaagagaattggatgagacaggtgagatggtctacccacattggggacccccaccatactcagcacataaagaatttctgcatcacaactaaaatgtttgatcatgattcgatgagctatttcatcacaacactcttggctgcactcctttgcatccttgcatgtgatatcaccagtgaagagtgtctttcttctatcacgaggctaccccttcaaagcatacaaggctattgttgggataatggcccagaagaatttacaggtcaacagatttttgttttgacataactgttagtgtaatattctttactaaatgatttatcagacttatcagttgtttaatgtattatgcagtgttaagagttgtaggcccatatgccatgaggaaatagggcttcactcctgctatactaatcactctttagtgacatttggataggtgatgggtttaggaaaagcatatggagtaggatacaaaagactgggtttggcagtctgggtctataggtgttgatgtttaattctcttcccatattttgtaatcactccacttattttggttcggaaaataaaagtaaaaggaaatcacagaaaagaagaccagatcaaggagcgagagcagtcgagattagcagcaacattaattaggaatacgaccggctgaatggatgcgcagctggcaaagaaacgacgatcctgtatcaattcttcacgccatctcgcctaggaaatcagatggcgagtatctcagagtcaaaatgaactcaaggggatgattcatgaaggtgggtcttcagccgatggctaccgacaacagaacaacccacagagcaacaggcccagtgaatgggtgtcaacagcagagacatcacgctaatgctcaataggtgagtaaaaaggtgctgatgctctttttccacagcccaaccacccaaccaaacacacattccattgtgtttaggctttagaatcatgaaaaaagaactcatttttgtcccaaatcccaaatcaaaacccacttctcttccttttcctcctaagtcataacagggataggagatcccccgaaccccccttttcatttccacccctcatttccgatgatcctaatgccatcttcttggtacgtatatattatcatccctcagacacacgacgaaacagtataatatgatcagcaaaaccctaaggattggttacaacaagaaagtactaaacctttcagatcaagaaaacggccagcattggaaaaacagatactgaaactacaaacagaatttcagcagttgtcagccaacaaactttcaaaagttacacaactaacttatgattcaagtattaacacttttttatgattttggagtaaaatataaaaatagtcgcaatgaagtaaataaagtattgaccttaataagagatgcacgccacctaatccacctgaccactgacagaattacttggaaaaactagtaacagtactgtgaacgttagcatttatcactgaatggaaagaaggaaaaaattgccatcttaaagaatgagtatgtggttttgtctattcaacttcatttatgttgcataactcatgattgcttggacttcatgctttgcttataataacagaatcagtagaagaaaattagtcacagaaaaaaagaatggattatgaaaaagaaaggttaaggatgactggagaagttgcaaagacatccttatcagtagcacaaacattctatagcaaacctacgataaagcaatccatgaaaccactcatggaaaatctagtcgtaattacaacttaatataagtccagaaactaaagtatgccacattaataaaatattaaatatatatgaatcaaaactaatcaaggactatagccctaaaagataaccagcaattcgtgctatactggtcctaatctttgcaatgtgagtttcactcatgatccacatccagggtatgaaattgattgtttagatacatgcttgccaattcggtagattaggtcaagcttgtgaagggagggctaagaggaggatctttgtcattgtctcctgtagtatgtgcgcgactgcaaataatttttgttaaccttttagctgcttttgtgggaatttgccttgttgatcacttttggtatatccagttttgttctacagtaatatacctgaaattctgaacctgccttgctgttagcttcaacaggttgctaagcattaaacagtggagctgtatttgtttatattcatttaatttgaaccatcgggaaaagggaactgctatatctgcctgtgctcatagaattttttgattgtgctgtctgtttatatagaccttgtatgtgtttactcttgattttgttttctgaaatatgcacaacaagaccttgaccaggaaaaaacgttgccctggttctccagtcctagtattcacttttttggacaattttgtttgatgtgtttttccagagttccaagcattagcatgtaacaacatgcacaatccaccaaataaaatggaaattacttaacatttcttagatgttcccaatttttaatcatcaattggaaccccagaaacggcaaacaatccaaacaagcaagaataggcaacaaattcatctcgaatgctaatgctggaatcagtacaggtaaaaaataaaaataccctaatttcagccaagcaagcgaaaccgtactgatcaagattataggcgatatcatggataatggaagaaaaaggaaaaaacttcgatacggttccccacctgttcacggcatcctcgatggactggaagggtgtcttgatgtcggggttgcacacctgcatcacgtcctgcagagccatctcaacctcagggctctgcacccttgccacggctgccactgccgcctgctgctgctgctggagggacgcccacgactgcaacagcgacgggccccaggagtggatctgctgctgcggcggtggtggctgctggggcaggggttgctggaagcggatcgggccaggcaggggcaggtgggcatcgatgttggaggggaagaaggacatggcctgctgcgacagctgctgcggcgtcggtgtgtacccttgcccctgcgcctgcgcctgcgcctgggcctgctgcatgaggaagatctggcactggtgcagctggttctgagccacggtggatgccgaggaggtcggggtggagtccgggccaggcaggggcaggtgggcatcgatgttggaggggaagaaggacatggcctgctgcgacagctgctgcagcgtcggtgtgtgcccttgcccctgcgcctgcgcctgggcctgggcctgctgcatgaggaagatctggcgctggtgcagctggttctgcgccacggtggatgccgaggaggtcggggtggagttcgcggcggcgtccatggtgggggcggaggtggattggctagaggagaagatctgggggaaatggtggggcttttgtttcgggcaaaatttgttaaaccagtcctaaacttttttggaaaggatacaccagtcctaaacttgccagttggatgtgactacgcagataccttttgggtcaaaaccgtgtgggtccgaatggaaggtagtaatcttttttatgtgctccgctaatcaaaacagtgccgatttagtattttaaacatgactataacattggtaaaaatggtaatatctaaacagaaaatgtggtacacgccacttcaaaacacggcgtttcatgccacccagattcttaaaattggaaatatgccaccctgtaattcccattgtttttaaacaacgcaaattatatttaacaaaatagatgattacaaccctgttattgaaaaactaccaaaactaggactgatctgccttccatcatgcatgttaacaaatagaactcctgtggcaggcagccaaccaattttcagaggttacactattaaacttatggtccaagtattaagctttttatggtctggaagaaaaatggttgctgtgaatttaacaccttgaatgccagaggcaaccacatatatcaaaaggaaacaaatctagaagcgtgtatactgtgtgcccaactataccataaaaagataatagaaaaagatctggttaatatgtgcactaaaaatttgaaggaactcaagtagtaattgtatgcagttagtcctatcgtccacagacagttagaatatttgtgttctcaaaacatatttatataatacttaataatttttgcacagacatcctaacattaaaatcttttttcccagtttttctcataaagagtagtttcatacagaacaaacttgttggtacataaattggccccagtacccagaagcaactctttttctcaagaaaatattcgcactaataggtgcagtcatatttttctaagaaatcatacaaagatatataaggtataccccttccagtgaaaaaaatatgtcaatttggacatgtcctaagtcaaaacttcatacatgtatatcttttcaaatatttggattgtaagcaagaaaaatgaaaattgtatgtgtagatttgttacagaaagtacttttgtaatggagttaggttttataaatacgttgtaaaagaaattagtggtcattgttacattttgaaaaccatgttagtgcgcaaagctccatgcaaagaatgaacaggaagctctcattgtagggtggtcattgtgcctcatacatctcttggaatgcaatagggttcctataaatgttcccaatacaatatgcccttccatagttctacctaaatcattatacaatatagtaagatccgagcaaaataaaagagttttctactagcaaagaaaatactgctaaataaagtattgaccttaacagcagatgcataccatttattccactcaaccatggtcagcgattatttggaaaagctagtaaaagtattatggacctttgcatttatcaccgaatagaaacaaggaggaaaatttgctatcttaaaaaatactgaatgcagtttagtttattcaacttagtttatgctgcataacttctggttgctctgactacattctttgcttgtatgctcattaagcattttgagcagaatgctgaaacaagaatttttcagtcactaaaatggaatggatcagggaaaagaagttaagaatgactaaaacagttaaaaatcttatgtgggttaagaataactggagttaaaacatctaagataacaatctgctaagataaagcaatccatacaatcactcaagttactacacgaagaaaccagcttgcaattactggttagtatatgaccaaaagctaaaagtatgtcaccttaaataaacaaaatccccatcaatagaaaataaccagaggcacatatgccgaaaagcatgtcacctgcaattcgtgctaaactggtcctaaattggaccacgagtttcactcatgaaccacatacagcattaacaatctgctctgtggaaaagaaaagacatacaggccaaaatgttgtcctgatcctccaatcccctaatgcccctactattcaccttttgggagaattttgtctgatttgtttaacaaggaatgaagattaatgttaaaatttctaagacgctcccaaattctaataatcgaaacccaaaaaatgggaaacgatccgggcaagcctcgagcccgaattggcaacaaattcatccggaacgcgtagcctaaatcagtatacagttaaaaatttaaagcaccccaatttcagctgacgcagcgaaatcaaatggatgaggattaccagcaaaatcgtggataataacgtatataagaaaaaaaaaagatgcagagaaatttggtgcgattcccccacctgttgacggcgtcctcgagggactggaagggcgtcttgatgtcggggttgcacacccgcatcgcgtcctgcagcgccatctccacctcggggctccgcaccctcgccgcagccgccgccatcgccgccgcctgctgctgctgctgctgctggggggacgcctgcgactgcgacggcgacggggccccggagtgcggctgctgctgctgcggttgcggctgtggcggaggctgaggcggctgcggctgcggctgcgggggctgctggaagcggatggggccgagcgggcggaggtgggcgtcgatgttggaggggaagcgggacatggcctgctgcgacagctgctgcggcgtcggggcgtggccctgcgactgcgactgcgcctgggcctgctgcatgaggaagatctggcgctgaagctgctggtgctgcgccgcggcggccgcggctgcggcggcggcggaggaggaggaggaagtcggggtggggttcgcggcgtcgtccatggcgggggagcagcgaggagtgagatctgtgggggaaacggtggtggagcttcagtttcgggcaaaatccgttacactgcactgtaacacgcgtacgttttgggagaaaactgtatggatccgaacggaaacgggaggttttgctggatttttcacaatttggtctttttgaaaaacttatttcgtaaatagacttctaaaaaaacttatcctaaaaatgattctttttgtggtgccagccactctggcgccgtccttgtgctgacgtggcagggcggtgatgaggtggcagggggagggcatcagtgtggctggcgccgcccccctccccggcgccattttttttctcttctcctctatagcgtagaggagagagatgtccaacatttttatttttatttttttcacacttatgagcacacaagaaccaaccataaaaaaaataaactcgaataaatgaaatatgtgacttgtagaattttctaaatttctaccgaaaataggtgtcattcgggtgtcatttcttaaaataggcataactttctcatacagactcgaaattaggcaaataattagaaaatggcgcggcagttggcgcgtttattacttttataacgtgtatataacacttatgacttatttagaacatatatttattagttttctagtttttctacaattttcaattttgtcaattttatttgtttttaaaactcatggaaaatagattgtacatattttatggtttatttagaacacaataattttacacaattgtcagaacggctagttcaattctcgtaaaatttatttaggatagagagtttagttttgtactaacttatcgaagattaaaatatttccaaatatcataaggaaatttgatgtatttttgtaaaaaaaaatcacaaatctgaatattttttcctttacataatatttagtgtatatctctatctctagagggggtatgtggaaacatcataatttacccaatagagtttcatatgcacacgacatagcaaaatttagtttgatatatgcacatgaattacataacaaaattacttgtccaacttataaaaaaaatagcctacttattaataagttttatcttagggccatttataaatactccaaactgagggcttatttgtaaatttaaattttttgagatgaaaaagttcagcaaaattgttttggtagaactggacatttttctttatcgtctgcataatttttacccagggtgtgtaaaaatcataatttacccattagaggagcgtacgcatatcatttagcacaattttagtttgatatatgtacatgaattatatagaaaattttaatttgatgcccattgcctcatggcagagcaaaatttgaacttgataaaattagttgcgggcaacctatcaagcaaaaggcacctctcttgctgtttttttttctatccacgtttcattttattcctcgtttcaacaggtgaaaacaatctatctattttattataaagatagcttgaaaataatacggtatttgctttgatcgcatagaaattgttacattaattaataaaaaaatataatagttgtatatacgtaatataatgattgtatttatattaaatgtcacaaaactacaattatttggttaaatctaatcatgtttttaaaatatgttacaaaatatattgtataaaagctaagaattgcaaatttaattctataattaaaatatgttgcataaaacaatagttgcaaaaaagaagtacatgtaatcctagtgatatttgcgtgtgactttcgtcgagttcgggtagaatcatcgagagtttctacagtatttggtgcaccgtactaccatactatataggttatttgctcagtgaatcatagtcgaaaatactcattatttctcatagttcttgttctatgagtgatagggtgcaccataatattcaaaaactgctatccacttagcatactcattcatcagagtagcttggacgtaacgacaagagatagaagtgcttgctcaattacatcgagttagtgaacagaacacttggtttgatgatatgattgagcttctaggtccattataatttcgatattgaatgtatatgtctgatatactatagattcaacaaacttctagttcgcgatatcatcagtcatcttggttaaaattcccgcaaataattccaatatattttacgtaattatatatatattacagcaatattaattaaaaaaataaaagcattacaaataatcaataatcataaatgcgattaataaattttacaatcataaatatctgaaatataatttaagtgtattttacaaatttacaatgtcattcaaacaaatattccaaatacagagggccatttatatattttctagaaatgtcaaggtttgaaacgcaaagtttccaatgtagaggaatatgcgattaattttcgaaaaccacaagggccattttgcaaaatatatggagattttttccttttctactcttctttccttcttccttatctttcttcccttccttctctttctttttctttccccttcctcccttgatggcgccagcgggtgcagaggccggacgggcggcggcggcgcggcgggtgcgaaggccggtgaggcgttgcggctggccgtagacgtcgtggccgggcgacattgaggacgaggccgtgcggcggctccgtgcgatgtggaggccgggacggcgtggtggggctggctgcggcttcggatggaggaggcggtggcagcggctgcggtcgctcgcgaacacggatccggcggcagcggccactattgcgcgcggatccggcggcgacggccgctcgagcgcgcggatccgggtatgtgccccacggcagcggcgcgccctttcactccctctccttctcgtccccttcccctctcttctgatccggcggaggcgtcggtggcccggttgcggcgccatcccctccgccagatccggcagcgagaggggaggcggtggcggcccggcggcaggaggcggtggcggcgtggcggcgggaagcggtggctgcccggtggcgagacgattatttagattttagatattcttgtgtgatgttttagtgaatgatttctgtgatgtttttcaatgtttcctgtgatgttgtttgatatgggattgggattgatgcggggtggatgagctcgatgcatgcaatctgctattcttgattcggcagtgatggactggtggagatcggcagcgggggtgaaaggggatgccggcgctgacggtttctccctggtgatgatttctctcaaatgctcgatcgctacgcctgaattttttttttttggactgggtggagcagcggatgaggagggccacgtggcacgatgttaggggaggcaatcctggatgctggtagcgccacgtggcccaatctcaagccgggtcttggacccggaaatcgtatatagagatatatccacgaatatctacagaaaaagttacatccaattcttgcaagagactccatggagtatgggctccaatgttgggagccgttggatggttgctgatcggtttgattggatggttgctgatcggtttgatcaattgagtgtatgagcataatgggtatagacccgtttagagtgcaggttttaatagtgaatggattcaatagatttgaatagattaaaaaaggaagtaatacatttatatatgcatgcatgcagtgcggatgagagaatttccataattgcgtgtacatttcaaaaatggaaacattaattgccagtgaaatttgaaataatatcttgtaaatatggaaagttacgtgattgcacggtgaggtttgaatatatggtaatataatggtgaaaaatggaaactaatcatatggaaaattggactttttttgccaactaggtatgtaatactaaatattgatccttcgtatttgaaaacatggaaactaattattcggaaacatggatactatatatcgcagcacatttttatggtaatgtatctaccaaattattccattcatgacaccattaatttagctatttgagtcacaaaatatgccctgcgggtcactttccaagttttaggtacacagcttgacatatacacgcggacgtaacaccaatatacttcggagtgtatatactcagtgtcgacgtttgatgccgcgattccggtatttgcatggtatggggatcgttggtactaggatatacgcgagactgaggtaaaagagacggagacgaggatttttatacaggttcaagcccctgaattgtcaggtaataactctacatcctgttggccgaagccgatattgctcttattcaccataatcacaccagtataatatttggggtagcctatctaactgttgtcgacatggcggtctgaagatctgactcgtagtcgacaacagggtagttttcctcctcaaatccgtgcccggcgagatcagagatagcgcttttgtttctcctaacagtatctggagacatcgtaggggactagccgtgcctatccctgaagtcgatatccggtgtcttgtcttggcgtatgttggcttgtatgttgttccgtctatggtgggtgttgatcgtgtgtttcccctctcctcctagagggccttgtatttatacccatatgtgtccccttgtccaagtagaactagggaaaccaatatggatacaattcgattagtccttgtcgtttccatgtagaactctggtttttttttccttatccggaactccctcgagatcagtttccgtataagacatggtatgtggtgggctctgtcgagatttagtcaactactattatgtatgtggtatccataaccctgacagtagcccccgacttcaatgcaaatgagcgagttcatattctcaaccgcagaccttggagaaactgttatcgagctcacgtgactgttctcggtgagttcagagataacgttagacttcctttatcagcctcgtgcgggcacctaaagggttagtttgtgtcaatctctgacgtcaaccaagaaagtatagagcatatgactaagtctcctgtcttgctgtaatcgagaatttggattgaagtcaagaaattttatctcggccggtataccatctcttcatttcgtattccttgtcgatatccaccaaccgttctcgagtgatcaagaaggcgcagagtctgcgacggagccttgtcaacatttgtcatactcgccttagtcgatcttggtgtagaaccatagagacatgaagtcttcgacaatgttgaatagaattttcctgaaatcaacactcagaaaagaacattagataaaaatagcccccgagcgagtgctcaaagggtaacatgttatagaatgtatggaaaactgaaaatgaattaggtttacaaaccaatgttttgtatatgagcgtccactcttttaccgacttcgaccaatcagtttgttgagttatacactctccctagcccccagccttgtcgtcggagaatcgttctcgggtgataagactcttggacctttgacctgccttagttgaacaagtactgatcctagcccccagccgtgaagttggaaaatccatttccgattacacggcttggttaatacgcacggtgagaactcttacacgaccagatcttacatggtctttcgtctctgaaggatccgacaaagccttatccgctctgggcgtccccagccgaagttcccttaggttcctcagaggctttgtcaagacgacgtaaagggacattaggataggtttcaatgctaggtgtcttttgtggtaagggatctctgggcaaaacacttggcgatattgtgcacctgatatcaactctgttggagtagaggtaatgggagaatcgctacacctctggtcgaggaccaggtagtagtcgtaacccgaccacttgaagtgaaaatagtgggagaatcgctacacctctggtcgagaaccaggtagtagtcgtaactcaaccactagaagtaaatgtacgagagatcgctacaattgactggttgaggaccagtgagtaggtgtctctcaatcatttgaagtcgtggtgcgaggaccgcttgtgttattgctgtagtcgttcctcgaccatctgaggttgcggtgcgagagattgctacgtactggttcgacgaccagcgaacgagtaaaattatctctcgaacaccaatggaggttgcggtgcgagagagtgctacgtactggttcgaggaccagcgaacgtgtagaattatctctcgaacaccaatggaggttgccgtgcgagagagtgcaacgtactggttcgaggaccagcgaacgtgtagaatcatctctcgaacaccaatggaggttgtggtgcgagagattgctaagtactggttggagaaccagcgagcgagtagaatcatctctcgaacaccaatggaagttgcggtgcgagagattgctacgcgctggttcgaggaccagcgaacgtgtagaatcatctctcgaacaacaatggaggttgcggtgcgagagattgctaagtactggttggagaaccagtgagcgagtagaatcatctctcaaacaccaatggaagttgcggtgtgagagattgctacgcactggttcgaggaccagcgaacatgcagagttatctctcggacaccaatggaggttgcggtgcgagagattgctatgcactggttcgaggaccagcgaacgtgtagagttatctctcggacaccaacagaggtgctagagttggtttattatgtgcgtctcatgtggctagcttgactcacacacccaacttgtagcatatccggatgtccgttcacaatcatatcgggtgatcaagccgacggtgttcgcgaggaattgtccgttaacaaccttttctcaagtagtccagccatggccagtgctatgagataggttgtcggtcttagttggtaggttgggcgcgacgactctgcatttgttgagatcgttctcgataatatggtgtactcgaccacaacctactcgagtgctcaactgttcctgaaaaatgttttctagaaggcaagacatatagcaggtaatatcgagtatgtattcgaaaaactgcatggatcttctagtattatcaggatataacgagcagattaaatatcaggcattatgtacaccgtaacaagcatgatttatacagaagaaaatagagcgagcccccagcgttataccgtagtcgatttaatatcggggacacttgcacaatagatattgtataaaaaacatgctctaggtagacataataaattactgatctgacaatatcgtataaattagaaaaacaggtacgataaattacatataaaatattgcgtacctgtgtagatacatgccggatgtatctacaaaattagtagatcaattaaaataattgatccaccaattacctgtatcgatctgtaattatggaagatgattgggcttgagactttctaagcagacctccattcacacgtagcaaaggacatgccacatatatgacattgaccgatgaccaatcgccgagtaaacttgatgagtcctgaccactgctcggtctaataaccacacgtgtcatgcacatggcggctgggcctgtaatcctccgtatcatgtattattccgtttcattgaccgatacgaagacgatcggaaggcggacacatgattcagaagtagctctccctgtgactggcgcacgacgtggtgatgacccgagggcataatctgctcgaagcctcagcgttgttggttttgatgtcggactgacctgtaactgacattgaattggcatcctccgtggcggcgacgtggtttcaaagtaatcaatcgggccaaggcctcacgatcgacgacattaaaccattattctccgcggtagcgacatcttgaagcttggtcgatctcgccggatcgaatagttgatgatgatgattccgatttcgtcggaagacgtactccggtcgtgttagatctccccacagccgaagtcgtcgagtagtttgttgttagagaatccatcttttgaatccatctcatcaaaatcctgaagcaccaaaatgcccctacctggcgcgtcactgtcgacgtttgatgtcacgattccgttatttgcatagtatggggatcgttggtactaggatatacgccagactgaggtaaaagagacggagacgaggatttttatacaggttcgggcccctgaattgtcaggtagtaaccctacatcctgttggccgaagccgatattgctcttattcaccataatcacaccagtacaatatttggggtaacctatctaactgttgtcgacatggcggtctgaaggtctgactcgtagtcgacaatagggtagttttcctcctcgaatccgtgcccggcgagatcagagatagcgctttcgtctctcctaacagtatccggagacaccgtaggggactagtcgtgcctatccctgaagtcgatatccggcgtcttgtcttggcatatgttggcttgtatgttgttccgtctatggtgggtgttgattgtgtgtgtcccctctcctcctagggggccttgtatttatacccatatgtgtccccttgtccaagtagaactagggaaaccaatatggatacaatccgattagtccttgtcatttccatatagaactctggttttctttccttattcggaactccctcgaggtcagtttccgtataagacatggtatgtggtgggccctgccgagatttagtcaactactattagatatgtggtatccataaccctgacactcagcatatattatatatatatattatatatattatatatatatataatatatatattagcaaaagtgcccgtgcgttgcaccgggtgattacggagtgtgtacagtgacaaaaaagtgttgtttggtttagacaactaatctgctaaaaaaattgtttgtttttggataaataatctgctatatatttgcggaatatatatgatgtttagtttgaatgatttgtagcatgagagaaaatggatggacgaacaatgcaattatctttgcccaataggcgacggatgaaaatttatatcatgaacggaaatatttattttttatgtaagtaagtgtaataaaatacgagtggaatatttgtactcaatgtattttgaattgcgagaatataaatttttttagaaacacatagtataaaacacgctcacgacgtgagcattgagattgacgaagttacaacgaatgcctcgagcactcgtgtcaaatcaaatatttgaatccaggttgactggttccaccataagaaacctatccggttaaattatacccactttatatttgtgggaatatacttgtctattgttatatgaggaaaatgtgtggagtttaacaaatcataaaaataaatcttattaattttgtgagagtgagtattgttttttatttacaaattgcatctgaggtagacataaaaaatgaaagaagattagacaatgagggaaaaataataaaaaacaagagcggacaaggacatagaaaaaaaagcagaagggataggtcaagaatttgttttattatttaaacaattttaataagtaaatacccgtacgttgtaacaggtaaactaaaattataacaaatataaaaataatagatcattaggatttagtttttacgatatgagcccttcaaaaaaaattccttatagaaataaaaaagttgtaaaaaaaaggcccattagaccctatcggcctactattgcgcgtccaacacatgaagcgcgtgtggtgttgtggcccaatatggaggccggcccgacgcgggatcgatatgagccattcgttttgatggacggctcagattgattctaaatccatcaacaccctaaccctatccacacctacacccgaccgcgagctccaccttccgctcggctctccccctcccctcccctctcctgaccagcgatgcctctccccctccctcccctctcctaaccggtggcgccgctcctcctccaccgtcccctctccgccgctccccacccctcccctcctggcggcgcctctccccctctccgctactccctcctccctctcctcccctcttgatggcgcctctatagtgtggcggcttcccgcgggtagatccggcgacaccaacggcgccggccgcttcccgcgtcccaatccggcggtggcggtggcttcccgcagtggatccgacggtgacgacggtgctgacgacttatcgcggcccgatccgccgacggcaacaacggcggcggcggttcccacggcggatccggcggcaccgacggctacgtgtgtggcggcagcagcagctgcttcccgcgttggatccgacggctacgaaggtggtggcggctttcggtgatgtttttattttttttcctctttcgcttgattgtcctattagattttgtatctatgtttgcaatgaattttcacttaatcgctcgtgcatttggttgttgctgcggactctggatgattttttttgtcttgtacgtctcatctcggatgttgtggacgagggatttttttttaggacactaacaaaaatttaacgcgttaacggacaatgtgacgaaaggaaaataatggatcttttaattaaaattaagataagataagaggtgccgttgttttaaaaaaccaacacttacaaaatattataataggtgtcagttaatttaaaatcgaaaactataatatattatacggaattgctagtgctctgttgacagaaaatagggtgctaaatctttcacttttttgaccattcatctctgtttacaattcgtgctgcatttggattgagcaaagtcatgtacggctgtggactttgagatggaccgagcttttgttgttgcattctgtggactttgttgttgcgttctgtgggtctcacatatttaccgttcaatttcgaaacacacgcctgctttttttccttgcatttgagcagtgttttctactgctactttgcttatgatccacgcttactaattacatcgtgcttacattataattacatatgtaattttatgacttacatcgtaaatatactaaaattatatatgtaattttatgacttacatcataaatacactaaaattacatatgtaattttaggaacttacaatataaatacatgccaactttttttgaatagttactctctaaatttaaatagatgagattaaatttatcctatggcttgaaaaatttgcatgataggaggctagaaaatctatcgcatgatgtataggcagtccctatattatattactggcacctaaaaaaccaaacagagtcttaggccttatttagttggggaaaatttttaggtttgattatcacattggatatacggacatacatttaaagtattaaacgtagtctaataacaaaacaaattacaaattctgccaggaaactgcgagatgaatttattaagcctaattaatccgtcattagcaaatgttttctgtagtaccacattgtcaaatcatggcgcaatcaggattaaaaaatttgtcacacaattttcgtgcaatctatataattgattttgttatactatatttgtatttgtgtcaaacattcgatgtgatagcgatgtgatagcgtgaaattttttgtttctaggactaagcagtgccttatccatccatccacaacggagataaggccaagcaggcgagctggcgagcatattgaaaggaaccgagccggcggggcccaccgaggagataaggacgagagcctgagatccctgattttctttctcgctctctcgtattcctctcctctctctcggtcctctctcgtttttctctcctctctctcggtcttctgtttcgctcactcccctctctctatcggagcggcggagccgaggcggcaggcagcggcgcaagaggggaggcggctggcgacgggtggcggcggcaggtggagacggtgcggcccagcggcgggaggcggcatcagcggcgatggtggcgccctcccctccacggcagcagcgtgcggcggcttcggcagcgtgtggcgggaggagtggcagccgcccggaggcgccatcccttcgccagatccgacgggaggaagggcttcagagccgcgccgccaccaaatgcgccggttgccttgatgctgtccctgccgccggcccgcgtcgagctcgtccacaagcccgacaaccacgccaagcacttctgccgccacacgtcgcctgtaacccgacatgcctcctgctgccttttgtttgccagcaaattcatatatgattgcctttgtttgactttctgtattgccggatcagattgggagggaggaaatacatgggtattaggtttattgtggggatcaaattcatgaggtcgagattaaatttggtattttcgtgttgtttttggttgtctggttgattaattgatttgggaatctatctcggggatttttttttaagacagactcggactcggggagggacggattgcacggacaggtgaaaattcgtgcatatggacgaaaatcatgtgacgaccggaaaaatactaatatttatattatatatatatatatatatatatatatatatatatatatatatatatatatatatatatgacactcatatggggcaccatggtgcccgggcaccatggtatctaatgtacaaaatcactcaaatttttcaaaattttcaaattgtgagtatatacctagttataataattcgattcatatctatacctatcaacaaaacaactcaaatttaactttatttcacaatccatgattacatacctaactaattatatgtatggatgctatatacctagaatcaaaatctaacaaaaacaagtttaaattcagtacaaacatgctttgaactagttagtaaagtagttaatgttaatacctaagtaattgaaaaagtttcatactcatttgaattgggtatatactcaatttcaacaatggtgcccgggcaccatggagcaccaaacaaatttactatatatatatgtatatatatatataggatcaatgttttgtactcccgggagtacatactccctctccttagtggataacccattagcatccaattaaattgctggggaaaaataaaaattttaatttccactaatcgctgcatgatgcatgcatgcacaggtatacacaccacatttggtgcacaattgaaccggggtgcatcaaatttgaacattgaacgtacctaaccatcctctaaagacatggatcttctaccgtgcaaactgattagaaaaatccgattataaacattttagtatatacttttttttcctacttagtagtagtataaactttactcattttagttaattagagcagcatatactacttttttcttgtacagtatatactgatttattctccgaaagagtatgtaccgatttatttcacaaagaatatatatgaatgtacatatgtactgctttctgcatactctattatagcaacgtagtaaatagtatgttcgcatactcttataagtatatactgtttattggaacagtatatactgttttcttataagtatatgcgctacttataccttggaacagtatatactattttcttgaaatttctagccagtatatactacattagtattgaaggagcatatactttttttttagtttggccagtatatgctgctatagtactacttttttgttatgctttcttgtttgctcagtatctgcatatactactcttactctttttgtttcttcagtatatggtgcatatactgcttaaataagtatatacactatttcttagatttagtagtatataccactattacttagataagccatatatagcttttcacgtgtgtagtataatatgctttttcacgagcaaaattcagaagtatgatacaaaattcttcgtaaataaaaaaacaagaggtatatatatgatctcatgcatgctcacaagcgaacgaaaaatagagaaaaagaaacaagaggtagatgcatgtatatgcttctgaaaaattcagaatctatattcagttatctgggaggttcgaacaaatgcattaggtgtcgcctctgatttttggcagcctatgcaccatgtgctgcagctgtaatgacaggatcttcaagactattatatttatacctctagaggtataaatatactcagatctactcctgggtttagagtagatctactcctgggctactagtatataccatttatttcagaccagtagtatatatatactgcatatactacttaattttctatcagtatatactgcatatactaattatgtttggtcagtatatactgcatgcatcatcctcgctaaaggagggtactgcctttttgtttgctcagtatatatatactacatatactacttttttttcgctcggtatataaataagcatataccactatttcttagataagttgtatatatattgctatccatggaagctggatatatacatatgcttttcacgtgcaaaattcagaagtatgcacgatacaaaaattcatccatatttaaaaaaaaaaaacagaagtgaaacaaaaggtatatatgtgagcaaaaaacagaagtgaaacaagacgtatatatatgagctcgtgctcataagattcagaatcaactaggcgaaaataaagagaaacattcaagaaagatgtatatgtgctgcatctgcatgatcgcctgctacttttggcagactcctgtagacgtatgcacaatgtgctgcagccgacgctggtctgtggttcgtcagtcaccatgcatgcatgcgtcctcgcatggcatctgcatacaccaaagaaattagtttcttatgggggcttaatcattcatggtctcatggagaacatcctcatcggcaataagtaatagaagcagatctaacaagaaaacaagagggatgatctaactagaaaaagaacaagggcttgccgcaccgatctgctgtcgtgcacctgcgattttcgccgcctcgccgccgctgcctttgcttgagacaatctgaaatcaaatcgtaagtgatgacgaaattaaataacaaaccttctatcggattggaaaaatggttatggatactcacaatcgtgacgatcgatagccgctggcctggatgggcatttttgatctggtgtagcgggaggattcatcatatatacccttgcctccacggaaggggtgcgatggatgtcctgctgcctgatggcgtttccatgggatccttagacgacggcagggtacaagacgatgccacacgcctgatggattgcatcgtcgcctccgactcgccgtagagccaaatcagcgttgttccctccggataaaccgtagatagcgcttccgtccaacgacctggcttatctagaccgaccgaccaaataaatattaaagaacagcggaagcttgactacccaatcacaagtacaccgactaggggtttacccccgttaagttctcatcctaaaagaagcaatcgaaacccgtatcactcaaagactaattctaaacctgcaaacaaaaggttatatcaacagcaagagtcagtacattaaacatgtaagcacaagtcaatcctaacatactacatgtaaggcatatattcaaaggaaggcaatatgtagttcaattttagcataaagcaaattttgtttcgcaattcttttgtaaaagagtttatgcttcaattaacaaagacatgttttaagttttaacattaagttcatcatatttccatcataatcaatctcttgatgtcatctttcacaacaagtcataatatatcatcacactcacacaactcaacacattttatcaatttcaaacctagtcacatgttcacattttaaaacatagagtctatacccatgacacttcaccaaagcgctcatgactgtgagtacggctaatcgattagtttttagaactctgcaaagtttgtacagctttacccacatgatatgaacactctagtttgtctcgtgttggccaaagcactaccacactctacacattgagagcggtctagaggtcataacgaagcctttacattacttagagcctagccttgcaccagcacgatacgtgttcctccatcctaggcatacttggaatatgtctagaaccgttaagtggcgagcccacgccttaaacttaatgccgtggtggcggacacaacgagaatccaccacgtggcacaataccgttgtattggacacgcttagtcacctaaactactacttcgggtaaataggaagctcctctgaattattcgaactcatacacaccggccaccagaatgcaaggctagttctaaatagattaatcagcttaggccatcctatactagcacatgtggatgtacgaataactttaagttggtgacacaagttatgtccttatagacttgggcaaacactccccctatcggtatgcaactaacaccatatgcacaccacttgctgcccaagtctaaaatcacattttacacattttagtttacaaatacccatcacattcattttattccagcaaaggttcatgtgtccaaaatcacattttaatcacagagggtatgagcatttgcatatttctaagcatggctaagcaagtagttgcacatagagcatatataaacccaattgagcacaaagagtgtactctaaccattcctagtggttcaatcagcaaggatcacaattattcaaggtagggaatgcagcaaataggtcataactaacttattccaaattttaaataccgatatagtctaagttcacatgcaactttgcaaacaaatattttcattcctcaaatcatgggatttaatgtgttcaaaggatgggaggagaaaacttgccttgatattgagaaatgttagtacctaatccactccttcaccgattatgcaattatctaaataaaggacacgttatgcatttaaactccgaaacaggtaaaaatccaaaatgctctaaaaatgcatgatttgtgcactgtgagttggtactgttataaaatgaatttaggtggaagaatttctattttatcactttttatttgtgaattatgaatttttagaagttatgtcggtatatagtagtataggtttagatagtgctataaaatatttttgcacagtggtttttattatatttgacttctcagaggtatagagatgtgttttctaagactaacacatttggtttcacaatttttagagttattatgaattctttatgcattttacaagttataacgtattataggtgtatagtgtcctatatgcacaggcctttggtatttgaggttcagaatttattctactttgtttgtgatgaatgaagcaaataattttgttaactagagggcccttatcattttagttcatattttataatctagaggggttctatatggatgactttataaatatcaacctaggaattatcatatgagctaagttcctctaagttttggtgaatggggatggaactatggcttggttctaacaagttttattttggtttgttcatagctagagtgtatttcaaatacctctacacatttattttacttaactatcactaggtgattaactcctaggttatctatttaaagattagagctaaaacatatacaaaaggtgtcatattttattttactatgttgaagttcaatattttctgattctatagaaacttggttcatttcatttggacaaaaaatgaattttctacaaattttacaaattaaaggctgttctatgttagtaaatccttacatgaatattttgaggcttttactacacagtaagtatatagttttatttttataacttggaaatacatgttttggtgatcctaccgaacttaagtttacccaaattgaagctaagttaaattttatatgaatttctaaagtttagcttatctaaaactagtcattttaaaaataatagctttagaggcatttcatacaaagtaagtatttaccttttatttcacctaatcagagagtgcaagatgatgaatctgtagaatttgagtttattataaaataagttaaattgaattttctatgcattttataagtttgtgtttgttttatgtatgatttatcctagtcaaatttttgaggcaaagtttaaacagtgagtgtcaagttttatgtttctaaattaaagttcataactttgtgaatctatagcaactggaatcatctcaaaataagttatatttgattttatatgaatttcgcaactttgggtgtttttctgttgaaaataaaatgtttagatgatttttctttacattttcagatttttataagcgatgggtccacctgtcagtgagagaccaatatgcaaaaaggcctctagggttctagagaatagatcccgaggtccctagtacgagcacatgttttaaccaaattcattaagagtccttgagttttacagtttttactaatagattcttggtcccacatgtaagtctaatatattttacattttaaaccttacaaaatttaaactttctctaaattaggttctcagcgtctaatgacatggggctcattcgtcagcgcctcggagaggccaggcagacagagcagcggccgagccggcgccggcaacaaacggcggccgttctcgcgatgcgaccaaaagagaaaacatagaggggttctaggcgaagctaatggtgatgtttatccaagctatggtgactggaatcgatggtgccggcagtgcgagcggcggtggttctcaggttgatggtgcatgtgtggatggaggtcaattccgagcgaaagtgatgtatgcatgtggttttctagtctccacggtgctcaccgagggctcagatggggttgccaaagtcttggcggcagcgacgacttgcagaacggctcggcgacggcgctccacttcgggtgaatggcgacggctcgaatgggacgacgagctgctaaaagaaggcatgcacgagggttgtgaggtcacaaggtgtcaggtgctagtcggctgcatctacagagtgggttgcatctacagttatccaagttggacccaagcaagcccaaggaagagaggacagtataaaggcagcaacaacacttggaagaagcatcgaacaaaatagaacacggcacggcggtggccacggcggcgacttggttcgggcttgaaccttgttgatctccttctttctccctactcctgctagtaacttgtatcccctattcactcccatttccaccccaaagcttgagttgtagtaatacaattgcagctcaaaaccaccacaacctccattgcttgtactggatattggttcattgagatttgggtattgggttactaacaatctggtatcagaggcatttagttcactgggattcttgtcatggaattgttggggaggcagccatgaaagagggagcaggaattgggttggaaaagttctcatccaggcagcgcccaccaactgtttgatggaatgtctagccaacctgagatgcccaaggaaaatcagaggatatctgagcatgtccccaacaattccaccatgaacaaagaggagaaatggctagatgaagctctagatcggatattggagaagtttaaacaaatggaggccaagcgcatgcaagaggagaagatcaatcggatatttcaaaagttgtaggagatagaggttcgtaggagcaaggcttccgaggaaatgattgctgccatcagggcaaccaccgccatcctcaaggttgcatcatctccaacacccatggcaccacctcctccagcacccaccaattgtttgatagaatgccccaacaacaacatcaattgggtgacgacgaattcaagtcacattggtgaggtgcttgttccgacagctgaccaggagttaggagacagcgaggacaaggacgacaccccctatatcatcaccaaggacttttccgaagtcacgcatgacaagtgttcgacagtgggctttgtgatcaagtgtggcgccaaccaagccgatgacacgtttcaagccatgacgggtgcatccaaggtcgttccaacatatgctcaacctatggataacttctcgtcaaggatgaatgacgacaacaagttaatcacattgatttccacaaggtgttcggtgaaatggcatggagaagacaagaacgtatggaggtgtacaaacatccatgttgtgcccctactatcttccctgctcacctcattgctgctagtgaaattatctagagggcacatggtggttattgggcaatgtgtacaaacatccatgttgtgcccctactatctcccctgctcacctcattgctagtgaaattatctagagggcacatggtggttattgggcgattcccattgcaacactttgaacttatactatagccacctccatcatcaaaggatccaagcttgggcttaagggagtatccttgctgttcttggccaagagcacacttgatgcaaccttggccacctccgacttcagatggattgactagaggaagggaattgcatcctatgctagggtcaggattcaaattctattgcgtaggagtacatttgaaactgccatgccccccaccaagtttagaactgcaagagtttggaaatccatgtgctgagatggttcaccttcacataattttcctggatcctcggcttcaacaacataattttcaattaaggtgtagatggtggataagtgagctatttgtggatgttaaaagtgctaaagtttatgcttttggggttagttttacaattgttagcaaggaagataacctggttgttgggtgctggttgatgaaatctattggaacagttcagagatgcaactgctatctagggccatcaaattaccatttagctacctacttgaaggcacaattatgtaagcaaggttccgaaacctatgcttgatgtggagagaataacaccattgtcagtatctatttaaggcaaccaaagtggctttaccacagaagcaaaatcaacacttgtgccaccttctaaacacacttgtggttttgtgcagaaaatatggcagtggttattgtacttccacagatattctatcaagttgccatggctagcaaagtgggaaaatgggatatgagagtaatttgcatggtaatgttaggaattgaatcatggcagccagcaaataacatggtcttgaatagtaaagaggaaatgttaaatgaaaatgcaagcttttatgccaaggtgatttgtgagaagcaattagctaagggctacagaagaacgagtagcactagagaaggtgctaattcaattcaagatgagatatatccttttgatctcgtttctgcaaacgtacttgaagaggtggtgtatattacttcagggtatacttggccatgcaaatgcttgatgggtggaatgagaatgccaagaaatgttctgaatcataacacgtggactcagcagttgagtaagctagtgtgtttgctaccaaatggttggggctctttgttgccaagcaaattgcttcaacactgctatcatgcaacacataggaaggatgcaaatgcagcaagaagctatacagggtgtcagtacttgtttattacacttcatttggtggttttaatttctatcattaaagagttcgagcagccacagggtttcaaaaggattacttcattggcttgtggtcaagccgaattttaagaagaggggattgtcaggtgctagtgggctgcatctatagagtgggctacatctacagttatccaagttggacccaagcaagcccaaggaagagaggacagtataaaggtagcaacaacacttggaagaagcatcgaacagaatagaacccggaacggcggcgacttggttcgggcttgaaccttgtcgatctccttctttctccctactcctgctagtaacttgtatcccctattcactcccatttccaccccaaagcttgagttgtagtaatacaattgtagctcaaaaccacctcaacctccattgcttgtattggatattggttcattgagatttgggtattgggttgctaacacaaggatggtgtcagcgcgaagaatcggactatagctcaccggacaggaaagaatcgaagatcgacgccgatggccggagttggggaagaaattggtgatctcgcgatacacggcggcttggctcgattcctttggtgtatgggctcctggggtcgaggggacgacgatggcgcggtgtcttgctctgggatggacaaggatggtcgggcgacgatgatgctgaagcggtggtgctccggagctcccgtggacacggtcgcgttccggtgtcaccactgcatgacaagaggagagattaggtggaatggatatggtattgataggaggttttggatcgggaaggaaatagagacgaccgcggcatgatggcgatggcgatggtcgtcgtctccacggccggcggtgagaatgagggtgacggagaggcagatggccttctccctcggcttgttcggctctgggttgaagagtgaggttgggcgactcagctggaaggagttgaaggcggggtttgacgttgccacgtcccgaccatgcgtcctgcggcatcgagagccagtcggcgctcgatctctccctctctgtgtttctcggtcggctggaggtgagggacagaggaaggcaagcctaggacactgctaagtgcgtccatgatgaagtaaactaggtgtaaaagagaggtgtgggtagaaacatgggtgaatatgatttttagatgaattttcggaattaatttctcctctaaatttttagcttcataacttaatgtgtggaccagattaactaatgttgattttaatggaggtagatgattatacctagattccattttctttggttgcactcaaaaattatggatagattgatcatagaaattaaccaaatatgggctaattaaaatctagattgaatttttaggaggcttaaactaagaataaaaattctagaaaaattatatttagatatgataaataatatagtatttaaataaattatttaccatgtacacttttatgcatttcaattcacttttgcgtgaggtatgttttagccaataaagaattataattagtctactattcaactagcttgacctatttatttaaggtaccaacctgagtgttaatatttgaccaaaattacagtggatagtttgtgctaatcatagtctgcataaatttttccatgattttatcttgcacaaaatattttggagaattagaatggcctctctttgtacatgtgttcccacttcataattgcatataatattattatagggattacattaaacttcttttgagctgagaagatgattgtttgagtttaatattatgtccacatgttatcacccaataggtttgtttagtaatttaaccctaacccttttaggttatgctcatgggacctattatgaaatgcgagaccaaaatctaaatgcacaagggactcgagtcaaggcatgcattatgcacatgtatgctcatttacttggtatttcaggtctaatgttgggaatgaaaaggttttattttgtttgcaatttttatttatgcaatggtttagatgggtctcacctaagttaaagtggaaatttttggctctcaaaattgtaaaagttagcctatatctattttgtctagaaatttttaagtcctagaattttgggtatgttacaaaaccccccctcccactccggtcaaagcatcctcccgccggtcagacctcggtcaaacccgcctattgactccctcccctgcctaccactttgttgttcacgtctcgtaggaattccgcagtaatataacggtcatcatgcagtaacaagacaactttctcgcagtaacaacatcgaaaaatagtcatgatagatctaattttggtaagtacttttttgcgaacatcatggtgcaaacagattagaaaaatactatataacgtgagagatattgctctctaaagatagatatttagtttttttagttctcgtctcactagaacgacatagtaacgcgacaatcaatgttctagtaacacgactactttccgcagtaacaatgttataaaagcatttttgtctcagccatcatgtagtaactagactattgtctcgctgtaacgttgttttaaagcgttatggtgaaaacggttctaaaaaataatatgtgatgtgagagatattattgtttaaatattagaattctaaaagtttacttgtactaagcttgctactatgtatctttgtatagacaaatagaagtacttttagcacttgtgttaacttgtgaccatgcacatgcactttttttaggactttgtattttgcacaagagtaagatttaaaaatttagctacgcacaagcagttgtagagtagtagtaccgttactaccatatgttctctgttaccgcaattttaccatgatgttactgcaaaaagtacagtaacgacctataaatttggaacaatcaaaaccattttcaaaattttatagaaaatgtaaaattttatagaatttgtaaaatttggaatagcagttttatttatgttctagaatttaacattcatccgcttctcggtctgttgtttctcaacatcggtttcccctcatcactctaaagtattctttgctatattaactgtcgggatcaggaatgagattcccaacctgtcactctaaagatttaattacaattaatacaacgatataatcggatcgtagattggacaattagttttggagaaaaatcgtttcgaagctcgctaaaatgcatgcatgtatgaggtggagagagagaggagagagtagtgatacgaagtttcacgaattttgtgaaacacgctgaagacacatattggaatagattactatcgtgtatgaaacaaagagtgttaatggattgaaacatatgattatttttttatcagaatataatcatgcggcatcttgtccttaagatataattacaacgaataaaacggtatgatcgcattatatattagataagtaatttatgagaaaaatcgttttgaatatcgctaaaggtgcatgtgtgtcgtatcggagatagagatataggcttggataagtgcatgtatgtcagaggcagcatatttattgcccgcccgatttttctccttgtgtccggatgttcgaagagaagcattttccccaaaaaatatacactattcggtccggtccaatcctcatacgaacatcgtgtacgcctgtccagccagatcatcctccgcgtatagttagaaaaaagagaaaaggcatgcggaacctacaaacccttgcccaatccttaaaaaaactcactagattattattacaactaaatttactatgctaggcaccccaataaactagaaaaaatcgaggaaaaaattccattgatttggccacagaaggcaaaaatgctatggggtgaacgatagcccctagcgatcagccgatcaccgcatccctcccccctctctccacatagtttccttttttgcaccgcattactttcctattttagtaaatttatgcatctaaagtttgtacaactcaagtttacacatctaaaatttagagacccaaagtttataagtcaaaagtttatatatccgattcaaatttgaatttgaattcaaatattatatgtagatatgtatatatgtatatgtttatatgtatatatgtatatatatatatatgtatatatatatgtatgtatgtatatatgtatatatatatgtatgtatgtatatatgtatatatgtctatatatatatatgtatatatatacatatatatacatatgtatacatacatatatacatatatacatatatacatatatacatatatacatatatatacatatatacatatatacatatatacatatatatacatatatacatatatatatacatatatacatatatacatatatatacatatatatatatattatatatatatagtatatgttgatgcgaaaaacacacactggcataggagatctacttaattccagtgcaggtgctaaatcttgctcttgggttcaaaggcgtgccagttggtttgatcctgtaaccaacaagaaacaaagaacgaaataaatgaggttaaatccataaacgatagccgatcggctaatggccgatgacatatcgtttatcctttagccgatgtcatcttgaattcgatcggcaatgaataataaagcaaaataagattaaatctactcgatcggctgtagatattagaaatatataatctatgtcttgacatatgtttaaatcaagtgattgggatagatcgaacatcatgccgagatagtataaatcacttatatccaaaagtacttcaagatagggattatatatactcatagcttagccgatgaagattggtctaatatgtatcagctattgctccgatacttctctatattaagatattaaaacaagtaaaatacaccgaacggtaggcttaatatattttaatgcactaagattttaatataaagggcagatttagtatatcaagtaaacatatagatgacatgataacttaatcagataatatcggctaaaaccccgacactatctctattgatgatcataaaacaagctagatattatggttctaaatattacctaatagatcgaacctaaccgatgcagcattaagcataacgagaaacaaaagatctaggcaagttgatgaaaacctcttgaagatgaccgatatgttatataacctagatcaacgatggcatctagccctattggtcgctttctgatcgcagatgtcagccgattcaaggttagatgacaatatcgatagagattatataacatatatgataactcgacgatttacttaaacaagattagagtatcatgaagatgtaagcactaatcccgagaacgcaagccgccataacaagttttacctcttactggagatcgaaactgatgcagcccaacttgaagcaagaactcgtcgaaagtaatgaaaatagaaaagggtggcgatgcgctgaaagtgttattgaaccgtcgttgttgtttacatgggatcgggctatatttatacctgagatacataatgggtccttgccggacataactcttatctctaacaaactctaagatatgaacaagtctttacggcagactcttaccggaacatatctctaaaggaactatttaaaatatcttaattaatagatacaattaccttcccaggactcaatccatacgtgacaatacttgggcaacacgtcgatcaaacctgaaaacaatcctagaaccaactcatcggcatcggctacatcggctattctttgttcgatccaatatcagccgatgtaggcactagccgatgctcattgtagccgatgcgtgctctgttcctgagaaacgatcctctgccaaatccgcttcgatcttgacctcgaacttgatgtataatttaccaaatttggtcgtcaacaatatagtatttctatacatctaaaatttatacacctaaagtttatagacccaaagtttataagtcaaaagtttacatacccgtttcaaattttaatttgaatgtattagtttatagacccaaagtttataagtcaaaagtttacatacccgtttcaaattttaatttgaattcaaatactttttatatagtatttctaaatataaatttttccaactttgtttttttatttttttaaaatttatggtgtagtaggaagagaagaggaggaggaagggggagaggagtgtacaggggggatggggttcccgcagaaggtgactttttcaccggggttttccaccaacgaaaagaacgaacaactggcagggcaactttgcgaggctatcaactttgtattgatttaattacaatcaatacaatgatataatcgggatcgtagattggataattatttttggagaaaaatcattttgaagctcgctaaaatgcatgcatgcatgcatgagtgtggagagagagcagagagagagagtagtagtgataggtagtttcgcgaattctgtgaaacacgctgaagacacgtattggaacatattactttcatgtatgaaacaaagagtattaatggattgaaacatatgattatttttttatcagaatataatcatgtgacatcttgttctaaagatttaattacaaagagtacaaaggtgtgatcgcattgtagattggataagtaatttacgagaaaaatcgttttgaatatcgttaaaggtgcatgtgtgtcatattggagatagagatataggcttggatatttgcatgtgcgtcagaggcagcatagttattgtctgcccgatttttctcgtgtccgggcatctgaagatggagagtgctacaaatcggacgtctgatatttttcaaaatatcggacggtgttgcactgtattattgcaaaatgtttcacatgttgcactcctcgataaaaaaatgtttcacttaaaaagttttagatgttttatcgatcgaggaaggtgttgaactgcactgttgaaaaatgtttcacatgttgcactcgatgaataatgtttcacttggaaagtttaagatgtttcatcaatgaaggaaaaatgtttcatcgcttcaactggaaagtttcagtttcagatgtttaatcaatgaaggaaaaatgtttcatcgcttcaatggaagtgtttcaaccaaatgcaatcaaaacgtattgattgcaacatgaagattcaatatgtgcaacatcaaatcaaacaaaaatgaaacaccttaatacaatggagtgcaacaagctaaaataataagatgcaacgtccctaaactccaaacaaaacaaacccacctccatcttctccgagaatacaaacccacttcaatcttcctcaactccggtcgccggcccccgagaaaacctacctctcttcttcttcaacaccggttgctggtccccgatgaaccactctcttctccattccgctgcgatggccgccgctgccgccacccccaactccctcctcctccgacgcccgacggcacccaagctggccacggcagcctagcagctccgtctccccacgcgggctgctaggaatctcctgcatggcagtggccacgcccgcgcagtcttccttctcccccaccggcggcggcgtcgccgctaaccgcaaggtcttcaacttcgccgtgggcatggccacgctgccgttctccgtcctccagaagcgcaggcggagcttgtccactaccatagctccggcatgaggaagatagatggaaatgtgtggggaatggagtaagtagtcagtggggaggagagagagagagagttaggaagttgaagggataaggctaacatgtggctggtggagttgaaaagtgaaccagtaaaatagatgggatggtggagtgccgaccgatttttttccaactgccggacgttcggcttaaagcattatagatccgaagatgctcctatgcatacttggatggaaccaatcctcggatgcctatcgagggcttccctaaatgaaaccaacacattattgtaatcagatgtgattatgacgtcttcaaggctgtgaaggtgctgaatgccatatagagacttggtatcttgttctgcctggccaaaaacaataagatgcataattctaagctttggcattgctcctggcttgatcgacaaactggaggtggaggatccataggtcaactttagttctttgagaactgaaaatgatacactatctataatgatctccatgccaggaaccatgaacacttgcaagtcaaggtaagctaggcagggtaaccttgagagaactcgcatatcatcacccttgagttcaacgaccttgagacacagactagttaaggtctcaacctgttgtatccaatatggaaccctatggaacgccttgtaaaggtgacacctctgaaggaattgtggaggaggagaccagctgcacaagaagctaatgggtggttgcctgatattcccctctagaacaactctgaaatctagacagcggaggttgcagccgcccagttccctgagagaagtggcaagagcagcaaactttaccatatctatcaggtcatcttcatcgttgcctcgacggcgattgtagatgacaccaagcgtccttagattggtcagcaccccaagatgtcggatgttttcaacaaagcaattgcagaagttaattccttcaagtgtacgtatagaggtcagcctgttaatccccctgccgagctcttcactccctgcagctctcagatgccgcaatgatggtaaacaagcatcacgcagaaatccacccacgagtacgagattagtgccgcaatttatgtcaaccacttgcaaatatcgcagttccccaattgtatcaggaaactggaaaaaaataccttccaacttcagatacctcagttgaaaaaggttacatataggagacaaatcgtatattgcacggaatgaaaaataaccttctattctcatatgtagaaccctcaaggctttaaacatgcgaagacgaggcaagctttcaccacgctgatggagccaattcccaaaataagtgatagatcggacttgatgtaaagactcacttgcttggattatgttaccacagtttgatcggtagttgagccggcgaatcaaaaagttacctcgtcttgagcaatcttgatcagtactaattacagtcacaaagttttcctccgtcgacttctcaacaataagatcaagtaacaaattgtgcacaacacgacaggagacaacctcaccatacttaaactgaactggctttatcaggcttctatttatgaggtctctgaagtagctctcagcaatatcttccaggtctcggttatctctttgggtaataaatccttctgctatccattgtcttaccaagtctttcttcatgatgttaatgttttcaggatacatatgaagatataggaggcacgtcttcagatcccaagataaattattatagctaagtttaagtatatgcttcatccatttagagttaggatttgtttccagttcaaaccccatagagttttttatcttcaaccaattatccagtttgttaacttctctttgactagccaaaagactagctatgacatctatagccaacggaactcctccacattttcttaaaatatcaacaacaattacgagttcttcaggttcagggatgtagttatctgacccatataatcttctgaagaataagcttctggagtccgtccaacctagtggtttcatcttatagacaatgccacggaagctagagcagcaggcatttgctacatcctttgttcgcgtagttgtaataattctgcttccactgttgttttcgacaaatgcaccactaatactgttccatgtttctatgcttgatatgtcatcgattacaactaggaacctgagaaacaaacatagctataatcaatagcagaaaaccatagatatctatagaaaaccatatcaagctatttttgttataaaccatatagttaaatcctggccttcatactcattggtatatctatatctatacctaccccgggcattatcttgtccagataataaactgttaaaatttctatcaagtctacaatcagatagagaaacgatgactgaatgcagcatgggtacagaacatgcgctgcaacagaaaatattagtacagattcgtaacgcccattacaaattaaaaatggttctcggttatgtaagttgagcatcttcattgtttttagcggtatggttaactggtcaaggtgatattgttacttatcatattactgaaaacaacaagatttataggtttaaaaagaatgccctaaaacaaaatcagaaactaccacatggtaaacatgctgatggtgtaataaatcaagataatttagtattaaaccttagacattaagttttcagaacatttatttggtgaggcatttcaattattatcagcaagaactacacatgatgattatcagtttgttgcaagaataaatttatccatttatttttattttagatatattttatgacaagaaattcattattcatcaagaaacaaagtggctagctcacactgaaatccaacagtattatctaaaggaccttctgtagtccttgttgatatagtactagttcaaagtccaaacctacttactcattgttttagcaatactaatattgttcttgtgtgcaacagtacagatcttgcaaactatagtctttttatagcacttgtgtgcaacagtattaggaggtacaaaattaaatttctagtgtttatttctggtataatttggtacttatgaagtatcaaattttacataaaaaatatagtacctcacagtatctttatcaagtaccataaatatctcacaagtataatgtacctctataggaaccttaaagagctattcaattgttgttgctgctgctgcatgttattgctgtcattgtttttgcaattttaaacctagttcaatgttatactcaacataatttacattgaagctgaaatcactcatcaagtagtaagtttgtgtgctagtgtgacaattatgatattttatatataattcctttttttttgcagcagttgctagaaaacattggttaaaatcttttgtgatgtttgataaaaaggcaaaattagatatacagttatttgatggttcttcatgtaatatttgcatatgatttgttcttttatagggaaaaaaattatcatatccaatcacaacatgttaaaaagaaaagaagatatattccctaggatcaaccaactatcctctcgttcaagaattggccatcggctgattttgtggattgtggaactaaaaaataattcttctgacacatgtgtagagttgttgataaacaaatagatgcaaaggggtggatttttttcgaagttctgactaaaaaggacaataattcttgaagagctttcatgaaagtaaaaggtggtgcaggagtattgtgaaaagaaagtattaaacaatggggaatgcacaagttttgcgaggaagtttgggttgttaaagttactttgtgagtagaatatcctaagccatgagtctcactctggtgccctctacctagagtagaaaaaaatctgaactgttgatctcatttgatccaaaggttcatatctatttctactaccaccacatttagtggtagtagaattgtggagggctactttgtccaggaaaaattatctgcggagggatattttcgtcctttaccctgaatcgcgcatctggagccgatgcggagagaaccccgcggctcccatcaccgccttgacgacctcgcctgctccaccgccctcgacgcctcctactcccacgcctccgccgcactcgccgcctcagccaccctcgacgagctcgcatctccgtctgggattgccagagctgcgccctctcccaccgctctcccgcgttggcccaccttccgacgagttcgcctcccggatctccgcctctgacccagcactgcgccaccggccgtcaccaagacctcgtcctcctcgctatccccttcctcgtcgtcggcctcctcccccacgctcggctccagccctgtccatctccgcccgccgttgatcccacagccgcgagggcaagcccccaatccatcgcctcccaagcggaacccgcagcctccggagccaatgactaccgatctctcgacctccgaatcatccaagactcctctcgctggctatagcgctgctctccaacggattagctgacatgataagactcttgttctgctttgcaggtcagatttgatttgttttttttgctgcttgcaggtttgcagctcgaacatctgtactgaatcttcttttttgttggcctctagttctcgaatagtttttctgcttgtctgctcaagctctgaatttcttggtcataatttttcctcctagaagaagggattcaagttgaatgctagtaaactgaatccggagcaagtgagcttgttcagaatagctgagcttgacaaggtggacaagctaatgatcactacgtcaatcaacgcttgagagattcctggtgtgttatgtcctgtaattcctgtgaatccattatctcaagatggctttgggtggctttggcttgttactgatggccatgttttttttcagcttgtggttttgaaagtgcctatctgtgtatatcatcgtttttgtggttcaatgtatattacttgttgtaattgcaattgtaaagtctatgtaaaacaacataccggattattcttccgttgccttgtatctgtcattgctggattggagtgtttcgatttgtccattgtgtgtaatattcagatatataactagtatatttaaattttatatgaaataatcaagctgaatggaaaccaaatacctacagcaagaaacagtacatctatggaacgcgatgcacaagcgccggcggtggctagacttcgcgatctgcttttctttttctttccctgcgctctccttttcgattaatgaggaaacggccactctgctgtacgatggagagggagcgagcgacgcttcaaatgagaaaaaaaactaagtgccaaatttacccctattcgtttttagcactttactaatctgccctttaaaataaacggtcaagattaattctacttgtagtagaatactgcaagtaaagggcaccggagcgtctctctatgttattagcaatcaacaaaagtgatcagttaaagatatggttttacaggaggccttccgaagaaacttcattgagaatgaataggagcatattatgttcattactggagaatgtagaattaaactttgacagcgatgggttatctttgcctcacagcacaaatgggagatattctctacaagatccttatacagaatataatgtatggcaataagagatagattacccgatggccgctctcttttacctgtttttatataagactcttgtattggctttttttaaagtaaagttgaattgatattcttgtgagtttctcaactgtttaaatcccaggccattggacttgacaattcaaagaaaattggggctggcaacgaactggctccgctgtaagtttttttttttataaaactatgaaactattcttgtagttacctaggaaatattaagatctcgaatgtgtcttttgctgtaacaaaatttttgtgctgttgtttttgtatatatgtggttcctctttaatagttttcagaacaatatatatttgccagaaaacctgaaacttgaagaaaaacattggaacattttgctcaagcttttgtcatataatgttgggaactacaaaaaaaatttcataaattttagaagcatatgatgaggccaactatttattacttcttccgtttcataatgtaagtcattctagcatttctcacattcatattgatgttaatgaatctagacaaaatgctagaatgacttacattgtgaaacggagggagtaggtcatctttgtccataagggcattatggccttttttttcagaaacatatctgcttatacgtatcattaacatgactaggaagttgatttatcgatcgtatataaggaatagagacaaacaaaatgcaaataattgattggtactgaactgagtgccaaggaatataattctctttaaacacctaagtaggaaaacccaaaatattatggactattatatcaagctgtttgctacatagacctttgatggtacactaagttgttgtgatccatccattgccaattggaatagttgtattgacacaacgaaatagaaacatagaagcatatgctctcatacctcttgcaagcgagtttttctctggttgcgtcgatcagactttgtatgtcatcagccgatccatcgtatttgagttgtgaaagaatgtcctttaaaatcactgacgcgctacggtttcgtgatgcaaacacaaacaccacgcactcaaatctgccatggattttattataaacctggatggccaaagttgatttaccaagacccccaagccccacaatggagagcaccttaggatgctgtcctgactctccttccatgtcctccattagcaactgcgtaatcacctcacacgggacattgatgccgacgagactatttgcctctccacacaggacaggtgaaatatcatcatcgatttcgtctatctgtctcggattagagctgatacactcgtcaacgtcgagattgtatctctctactcttttgacttcctcgacagcataataatccttgatttcgtcgattttggcgaacaagttagggagcatcagctccatcgtgtcagtgagcaaggtggccttgtcaactgcagtgccaaaactgtgcatgaacatgtcaattttgtcctcgacaaagtaggccagctcacgtaccttgttcctcagctccctctcctgaatattcagagcctccatgtcaggcagcttctccagtagagcattcatgcagctcaactcctctttcaagttccagatattgttcttgaaatcaaattgggtagaaaattggaactctgccaagtcgtatcgacacacctcttccagcttcaccaggagtgagttcatcaccccagtcgaaatgttcacggccatggctcgatcaattcctctctctctctctcgctcgctctttcttgatctatgcttgtcaatgatcttggcactgcgtttgaatgtcagtagctagcagatcaaccctccagttatataacataagatactagctaattaattgttctttttttttctttagaatgacagctactaatttggaatgttcacgaactttcctacgtgaagagtattgtacgtcgatccgtataaaaaaaaatgaaccgtgaaaatcttataattattgctggtgatgcacatgcatgttatctctctctctcttaaaagaatccatggatgaaactgtaggcgaattttctcccgttgaccatttcatatcataaaacatgttggccacaaggatcaatttgacaaatcttaatggttctacatctatcgttccttcgtttttagcagtgacactatggagtatggacagagcaacatgatcaccaaaacacctagtttcattattaacatgtaggagtataaaacatatggaaatatacagcaatgttatactattatttgaaactaattttgaagataaatctggccacgacagtgtaaaaaaaattgaattgaagtacgaaaaaaaatatgaatgagcaagatttaaagttggcctcatcttttcgcttaattatatttatacttataagctaaaatttgaattttcatctttaaatttaaagctgattttgagttttttaatcaaagtgtattttttatcctttgtttttagatcgctaagaacacatatataaaagttttgttcacaaattatttttcatttgcaatcatgtcgtttggcttatttcacgaataagccaaaatggcagggtaatttccttgccacgaataatgactatggttcataagttgacctgctaaccatcacaacgtaatcccaccgttgttctaatggccgggcacatgacaaccctcagtttgttggaacggattgtacgggtatgttttttttcttctgtgccgtgcaattaatataccctatccgtcaataaatatttgatgttttaattatattattcgattagatttttgaaacgttgatcataaataattttacaaatgttttagatgattagagcaagtataatagtgagttataagcattctataaccttatgtggaggagagaggtaaacaaaaaagaagggtgttgactctcatgcaagagctagcttaacacaagctccaagacaaatacattaaatatataagtgagagatagagataggagaagaaaatcataactaatcttatagctaatctataatatgtgttgactttaggatgggctaatagtagaaagtaggctatatcaggccattcccaacccaatgactaggatggtgttcatagcattaaataagttgccacctaggataaaaaatgatgtggcaagtgaataaatgagaaaagagaaggaaaccatgtcttgcatgagacatagtttctacacaatatccaagacatcatgtaagataagtagcattaaatttaagtatggaatagtgatgtttgcattggaagagtagtgcttagtactggtttcttgatgatgtggtgtttatagaaaccatgtctagtgtcttgggttaggaatggccttattatctttctcttaaagagatagtacatgtatatttcattaataccttgaaaagtaatatcatgtacttttctacatgaagagtattgtacgtcgatccgtattaaaaaaatgaaccgttaaaatcttataattattgctggtgatacccatgcctgttatctctctcataagaatccatgaaaaatactgttggcgagaactttctcccgttgaccatatcatcataaaacatattggccacaacccacaaggattaatggtttacatctatcgttacttcgtttttagcatatatgctacttccagtcgtgaataagtgatactccctctgtttcaggttataagacattttgacttcacttaaagtcaaactgttttaaatttaggcaaaatttgctacaggacactcaaaaattatgtaattagctgagagacaccgcaaaaaagtgacattgcccatagacactataaaaattatataattagctgtaggacaccggacgcattattttattatttttggactgaaagtggtgagttttttttcaaaatgaccggagtgcccctgcccctcgccatctatcccagacttgggtccccggttgaaccaaacccggtaggattcgtcacctggtgttggcgagcggatgagcaccctgggcacgacattggcgaggcgagtgggtcctgctgccgcgacatcgactagtaacaggtggctgccgtccacgtcgcggagccccacatgtaagcccctctctccttctctctttccagatgggggcagcagagcggtgactcgtcgtgcctgccttggcccctgctcacgaccgtgcagcatcgtcgcagccgaggcgtcgcatcggcccgtgccttgccgtgccagagccggcgctctccctcttcctcaggcttgcttgaagaaatagcaaagagagagagaatgagggagagaaaataaaagaggagaaattccttttccacaatcatcagataattgagttgaatcaaacactgcaatagtgcaattccttcaaatccaccacaaattcagagaggaattaaatcacaaactcaaccaaaggaacaaacaaatcaattgtgcaatcactagcaaagctaggcgcagccatggggatgcccacgacaagctttagttcttgtcggcagtggcaagcttgcacttgaccttctggaacaccaccgccggcggcgcaagctgcagcgcttgagcaggcacggcgcggcgagcttgcacttcgtgtagtgcgcctggtatctgacctcaccggagactgtcacctccaccttgaactcccttgtcgcgttctggcgccacctccaccacgtcgtgccggccccagcccctgcgtacgattctgtagcgtcgcctcagccgaggcaccacaccagcccacgcctcgccgcgccgtcgccggagctctgctctccctcgggctcgcttgaagaaggagcggagagagtaagagagaaaagaacaaggaagaattaaaaaaattagaagggtagatccgtacttacacagctgtttctctctccaattcgtccggatataataaaataatccggtgagtgtccaacagctaattaccagttttttacggtgccctgtagcaactacccgttattgcggtgtctcccagctaattacaagatttttttggatgttctatagcaaattttgccttaaatttaaccatatttatagaaaaaaatagtaagatttttaacccaatataaatttattatgtaaatatacggtagggctattcgcgctctacaacgtggaatattagttcgagcaccgcacaacgccctctccttccggttttcccgttttttaccacctcacctttcctcgcatcccacttttctcggttcgttttcaatttttaccacactatctttcgtgtttcttttttctcttttctatctcatcggtgcttcatcaatgggtccgataaatattaaccatccatatttttttgttttctgttttttttccttctttgtagttttcatgttttcgcgttttagtaaaatatttaccgtctattttttctttccaagttttctgtttttctactatatccgcacattttaaaagtaacgaatttactctgtggagttttttatttactcccagcctcccacatctgctcattcaaaagtaacaaatttacttgcatgaatacctccacatcgtatgacgctatacctagatagtcgtaaaagaattactaccaccttacaatgctagtaattcttttaccaatattattaatattgtttagatttcgtggtatgtgagtaaaacaattactaccttcctctcgatataccccataatctcgtagacaccgtgtattaatatattcgtagcaaccgtgtattaatatatttactgatgtgttcaatacacagcataagagtaaaaactgagatttcgtggtctgcgaataaaacaattaccaccttcctctcgatatagccatgatctcatagccaccatgtagtaatatgtttactgatgtgttcaatataagtataagagtaaaaactgataagagtattgttgatctgtatcacaatatagtcttatgaatgaaaaaattacaggctcaatcacacacaagcaataaaattactcacggtgaatcaaactagaaaagaaaaaaaatgatttagccaaaaatccatctggtggctttgctcgatcttgctgtaaggatgaagagcacggtctgtgtcttgtgactagtagtggagagggcaaacgggtggcaagcagtagtcgacgatggaatcatggaaaaatgtagtcgacgatggaatcatggaaagatgtagtcgacgctggaatcatggaaagatgtagcaatgtggtatagagatgagctcgatgttgcgcagtagcatccacccatcatccagcaagcacgaaaaaaaatgcaaaaacattctcgttcgtgtcaatagagatgacgagcaaaagaaaaatagcaaacaacctccatcaccagcggactccaccctatcctttgcggccagccacatggagcacgatgtacaaatgtaggacctgtgcagcccatcaattgagataaggtaatattggagattgtacattaatttgatttgcaaaaaaaaaaattggggcttcatgcatgaagttaaaggagagtatgcagatgcaaatcagagtgtcatttccttacttgcttactctatcaatgtcgtcgacgtggagcaaccgctggttgttgctattggtataggtgaacacctccttgctggttaaggtgatgcccagtgtccggcagcgaggcccgaagtagtgccttcgtctcatccgctgctagccaccgctcgtcggccaccgccatcaaccaccacggtgtcgtcgttctcctccatggtgtgtcaccgatctctgggttgggatggtggatcgattcatatacgaaaaaaaagggaaaaaaatgaagtggggggcaagagtggttggttgggtatgggaaaaatagaatatataccggaagcaaagaagttatttttatcgtagtaaatcatttactccgataatagtgggagcacgatgcgggacgtcgggtgggatcggaagcaagggagttgtttttattatcgaagtaattaaatcgtttactcgaataaaagtgggcggttgaggcgcgcgataggagtaaatcgtttactccgacaacggtaagagtggattgacgggatgtggggtggggtgggcttgggctgatgcatgtttggcgcttgaaatattaggagcgcgctcctaatagtagttctagtaaatatattcagttattgatttgatggcactaatttatagtattataaatattattatatttgtctataaacttagtcaaatttgaaatagtttaagtttaaccaaagtcaaaacgtgttgtaacctgaaacaaagggagtggtatatatgaagtatggacagagcaacatgatcaccaaaacacctagctagtttctttattaacaagagtataaaacatatatatgaaaaatatagcaaatttataatattatttgaaactaattttgaagataaatctggcaacgatagtttaaaaaaattgaattgaaatgtgaaaagaaatatgaatgggaaagatttaaacaaatattgactgcagacatttaaaaacacatcacttatctgcaactagctagatggagtattttccatgccacgaataatgactatgatgatgttgctgccttctgctgttcaccggctaaccatcacaacataatcccaccattgttctaaccgccgggcacatgcatgacaaccatctattggttggaacgaattgtacgtgtatgttttcttcttctcactactagaaaaatggtttttccatgaggccaaaactgaacctttcaggcgggggagcgatccgcatgtatgccattgcctgcaaaaataattttcgcaggcggcccaatcacccacctgcgaaaatcatctcgacgaaaaaaaaattcgccgcaccccacccgtgctcctacccactgtcacgccccgaactagtcccgaccggaactagcccgtgacgctccaaattaacctgttaattgataccagtcccaggaaacagcgctggtatcacaggaagacagaatatcacagcaacagaggtctctttattatagagtaggagtacagtcatgttgggctgcggacagatcccgagctcacaactgcaatacaaaagggaagcggaagccaagacttggaccaaacatcacaggcgcgacttgggaactaggccgaaaccctaaaactcatcgtagccggcttgctcctggaagaactcctcgtcagcgggatccgcttcgtcttcttcagcaactgaggggggattatttatatagagtaagggtgagtacaggagtactcagcaagccatgggaaataagtgtttaatgcaggcttcaaggaaaggccgctattttttttttgcgattgattttatttaaactcttttctgaaacaactaagggagtgcttctcaaacgacacggatgagacagtgcgtctcgtccggtcggagtatgtgcaatgtttcagtcttttaaattgatcaagattggcacccggccaacagctttcaaacggccacccggggcctggctgatcccatcagccgcagattttccaaacatcaaacccattccacaacagcaaatttcacaaggcagtagtcaaacaaaactacgctaggaatcacctcacatccgcccatgaccgtgggcacggctgttcgaacagttttaataacctctacagagggggtacactttacccacacgatattactaacccagatcatccagcccgtgcagaacggccacgactagagaccttaaggctttcatgacaaggcatttcgaaagccgacataggttcaccatatgccaacgagaggggtcccagaccaacaccagattaggtcccagaccatactgtgccaggaagcccaggggtcctccccgacaccaccctggcgaatccacatgtctcttagcatcatggctcccccgataagctagttactcagccaggggtgtcccattccacccatgtggtcgtacttgtcttatgttcggatgaaattccaaggaaacggtccttaagtgcaagagcgggaaaccgtacacccggtacgttccccggtccgcggttttggaaattcatttagttcgcaagcaccgacccaggtgtcgggttttccaagtcttttgtaaaacccaagttttacccaagatgtttctcagattttaagtttgaaggtgaccgtcgatacccgtgcagagtgcacgattaccgaggcgcaactaggtgggtacaagggaacatggtataacaattacaatggaagggtcaaatgcaacaaattaggtaggtccgccaatctgccttgcagacgggacaagcagactaagtgcgatcctatcaatgcataatatttttcaagcaacataattaagttcgaatataggctcaagatgttcaaaggtggcttgcctcgctcgagatcttgagcttgatcctcgaaatcctcgcactgcgggtcttcgggctccgaaactacacgcgaaatgggacaactcagcaaacggcgaaattaaatccctattattgacctctaagcgtgccattagatagatctcgagatttgaggaattttggaagttgaatggagtcaaacggatttacggttgggaagatattgaatttctaagaatattggatttttggtctaaaggaaaaggatttatttaaatcctttttgaaaaagaaaagaaaagaaaagaaggagggagggaaattagacttccctcgggcggctagggcgcggcccgagagaatggggcggctcggccgagcttaatgggccggctggcccaagaaggcggcccaaggcgcacatgcgggctgggaggggagagagagagccggtaggccgggtccatcccgcgtggtcccgtgtgggacccgcttgtcggcgactcggctcaccgtgagcgaggtgcacgcggggcgtgctagggtttggggagagaggcgcggcgcatgcgcgcggttcgcggaggacgtggtgcggcgggcccacgcgcagcctctcggctcgcggtggaccgcacgcgcgagggggcggagggaagcggcggaccggggtctgcttgacccggtcgcggccgaggtggtgccgacgtggcgcctacgtggctgccacgcgggccggcgggaggtagacgacgacgccggccggaacggatagcggacgacagcggcaagcggcggagcgaaccatggcgatacaggcgaaggcgagcacaccgggatgttgcacaggacgaggggagacgagccaatggctcggattcgccgggggatgctcgacggcggcggattgcggcggcggcaaccgacagcgggagaagggggaaacggcgatgaggtcacgaggggccgattcccggcggcgagagcatcaacgcggctacgggaacccaccccttgcgccggattaggaggaatcgcatcgagggaggccggcgacaagaggcgcttccgagctcgggcggcgactgcggcgagcacacggcgagcgacggcagcagtcggggcggcgccggctagctacggggggctactcgtgctactacccgagtctaaggggaggagatggaacgaggagagagaacggagggaggcactaccgtgcgggggtgatggggcgcagtgacgatgggccgacggcacgggagcgatctctccggcctcgggctgggggagaggaagaagacgagtgcctggagtccccttccgcgtcctaacgcgcaccaactcctccggcacacgcgacggcggtggccggcgagagagacagcaatggcgcgggcgagaaacggggaagattgggaggggaaagaggaagggaggcgcttgggtttatagggcggcgatgtcggtttggaaaccgaccttgggcagtcaagggagcgagctggcgctcggcgctcgcagccaaaacggcgacaggagggggggaggatgacgccggcgggaggcaaaagggaaaaagggggagagaaagagggcttgcctccttgccgctttgaggaaaaggaggagggagagagggcgacgcggcagaggggggggagctctgcctccgtcccttggaggcacgcacggggagaggcggagccgagtcgatgacgacggcgatgacggcggggcggtttggagtggagcggcgacacgggcggcagacgcggggcaggcgcggcaggcgctgacggcggcggcgactggccggtcggccaccacggcgcgcgcacgcgcgggcggcgcggcgatttgggcggcatcggcgggaacggccgcgagagtggagagggagagctcaacgtggctcacgggcagagcggggagagagagagagagggatagagagagagagagagacggggagggagggggagatgggccgagagggattcggcccatcgaactcgagggaggctaaatagacttttgcggagggatttgatttgggaaggatttggattcgggattgaacttgacgatagatcggggatttgagatctgagatggcacggacactagacaacaagcaaagaaacggattcgcaaatagggtttttaagagatagttttcccgctaggcgccacgacggaacgggcgctacacccacctccgctgctgccaccaccctcgccctccctccgaccagatctgtgagagaggggaactgccgccgccgctgccgtcctcccccagcctccctccgcctagatctgggagggacggggcatgtcgccgccgccgccgccctctcctggcctcctccagccggatctgggagggagggggactgtcgctgccgctgccgccctccctctggcctgatctgggagggaggggggaccgccgccaccacaatctctcctccctcctcccccccttgggctagatctgggagagaggggaggggagccgcgccgaccctgtcgcctcgccgttgccgccgttgaccccgccgcctccacgcctcgccattgccaaccccgccgcctcccatcgccatgctgagggagctaagggagaggagtggtgaggcctgagggagaggagagctgtgagcctgtgacacttagaaaaaatcgatgtgatgtggtgtctatttatatccatgtcgattttcatgggcagaccacttaagcggtctgcctgcaaaaataaagggcatcggtccgcctgcaaaaataaagggtatttttgcaggcacaccgcttaaatgttccgcctgtgaaaatagattttcacaggcggactgcgagtttcaaccgggtttacatttttgtaggcggtcatttggctccaatggtcatacccgcctggaaaaataaaaggccaacgttacttaaaaaaattatttttctagtagtgtatgtgccatgcaatattatccgtcataaaatatttgatgttttaattatattattcgattagacttttgaaacgttgatcataaataatttcacaaatgttttagataaagagatggtacaggtagatttaataccttgaaaagtaatatcataaacttatttaactttagaaatttaatttaatcaactcacgtctttaacatcgaaaggagagtgattcttcttcctattaataatagaaactggcacgctcttgtgcctctgcaaatctgcaataaagaaatagttacggatggaagtcaaattccatcccttgctgaattaagcataagatcatcctcaagggaggagaatcttctggcctataacacaagtgggagatgctttcacgtacgcctcttcaacatagaatagctggttgatcaaccggtacaacgtattgctaattaggagtcccaaatctaggacagcaaatgctgagctagcagaaaataggcaatactattgattagtcgaccacgcaccttccagctctaagcctctgaccttatgttcttagtttcaataaacgttgtaagatgcttatggtagatggttacatagtgaacaaacaaaaatgagcaataaagaaaggggaacttttacagtgcaatatactagtagtatatacttatgaatgagggcacgtttggaatttgccaccaaatgtaaaaggatatttcagtaattcatgattcatcttcaatccaatcggcaaactaatcatatctaatcgatctagagcggagagacgacccttggcattggcagaatgacaaacatcggtggcgttgtgtaggcaacgacagcaccgcggggaggagaggtacagcgggaggcgcggctgcggtttgtgatagtcgtgttttcatgacaaatgtgaagggatatgggtaggctacaatagcaagcagctcccgtgctcagcggccatcgctgccatcctcaatcgactgcggttggtgcacaaatccgtctcccctgccttggcaaccgtcgagcgggcctctagttcccacatccatgtctcacgggggtcgctgtcgctagaggaactgcacggcatcacgcattagacgaagtctcggttggcggctcgaagacaaagacgtcgaaaaggagcacaccggttcagttgttgtacttcacggccttgaggaggtaagcgtggacgccctcgctattgccaacaccctccttgccgccagatccatgtgcgcacaaagggggagaacccgtcagattcaccgtcgccgagctccctagcgccagatctgctgctgccgagctccccaccgctagatccgttgctgctgagttcaccagcactagaggaaagaggtcgttggccactcctgaggtcacggcttgcacccgctgcaagtgagggcggatccgtccttctgagcccgccgatggcggatccacccttcccggcgagagtcgttgccagattcgctgcgcttgttgaccgccacctctgccaccctaagagccggccgccaccatgggagaggaagggaggagatgagcgagggagtgagagagggaagaggaagacatgaggagaggagaaaggggaagcagcgaacgatggttctggagaagagaaataggtgtagtggaaaggaggcgtaagagaaaaaaggtgtagaaaaaaaatctatttcccacttgctctccacattgcccgcatgcaaaattagtttttcgcttgcagccccttaagaagcctttgatttatctcgggttaacttttttgcatgcgcgaacagctatggccaacgtgtaatttggaggggaaattgtcctcgattatgtagtagtgaacatgccaaaaaacctgaaaaaagaacgcaacatgctatcaacgcgatagctaattcgtgcgcgcgccaccggtgcgcgtttcgggcctagaaggcccagcgccggcgagcatgcgtgcggaccacgttctttttttttgctttcttttttgccatgatttttttcctttccttttttcacttttttcgattactttttaaatatttatttcgctttcttttttctgtgattttttcgctttccttttttttccgcttttttctgattacttttttaatcttccaacaacacatgtttttcaaaatgttttgtgttgaaagtttttaaatattgacttgaaaattttcaaatcttaacttaaaaatttttaaatctcgaattgaaagtttttaatcccgagttgaaagttttcaaacccgagttgaaagttttcaaaatctcgagttgaaagttttcaaatctcgagttgaaagtttttaaaccctagttgaaagttttttcaaatttgagatgaaaagttgaaagttttcaaattttggcttcaaaaattcaaatttcaagttgaaaagtttttaaatctagattaaaagttttcaaaatttaacttcacgtatagattttttttcattctgttacttaaaagatcttctagaaaaatgtcttattttaattgccgtcgttatctaaaactaacatgttagttatgttagatatactcgtcggaaaaaataccacggaaaaaaatccaccggcatacgcgattaaaaaaaaccacagaaaaaatgaaaatccgaaagtgaaaaaaacaacagaaagaaaaaaagaaaacccaccctcaggccgcgcgcacgcgccagctaggaagccaactatcaatcgcctgttgcacttgcaagcgaatgttccaaaaaggaaaaaaaacggggagtttagcaggcgagacgcatgttggactgtcttggtggtccagtctcaagtagtagtaacatttggcccagtctcggctaggcccatgctgtcctccggccgacgaaagcaacccccactagggatagggcttcctttcatcacgtgtttgatacgtagtaatagagagaagtctttgatacgtagtaatagagagaagtgaatccgaatccaatcgagggaagaagatggtgacgccggacaagaagaggaggaacaaactcgcggcaccggagccaacgccggcgccggtacctcgtctcgtgcgcgttcgtacagggaacaggaagaagaggaaggtggcctcctcacccgacaagcagccgcagccaccggtgtacatggtgttggcgcacggccgagtcgaggatgagcccacccactccgtaatcgaggtcgccgccagcgctgccgcccgctgcctgcttgacactgttggaatttaatccaattaattaattgagtcttagcctaaacatgatcaccttctgcttatgcgaaaattaatttatctaattgacctgagatgaagccaatgatgtcattgctcttcttctttcttcttctttgtttcttctgttgtgagatacctcatgaaccccttccagtgtctaatcgatcgggcgattgatttagggtttagggttggagagagttgagtcgtcacacagcctccctccttctctttctttatatagcgacattggtggggctcgggggtttatctcaatctaaaattcgaatctattttgtatcgatcacacaaaacagatttatctcttagtttgtttcttgttaggataggaaaaccggtgggattttaaccttatcctaactaaccggcattagccgataaaatcaaccaacattctccccttgattttgagactaactgacgagtttatcaaataaaatagctccccaaggcaatgtgtcttcaacaacattatgcgtcaccgagacaacaagacctatacttcactatagtacccaaataaactcaagcttaacttagtgggtgttgattgaaaaattaagtccccctcatccaggatcttagtgaggctcttatttatgcatgtactagccagaacatatcttaattaatcttaactttatgagcctttagagtatagatccatgagcaaaagcttggcttaataataattcgatcctgggacatatctttcacaactatatcaatgtgttaggcaaaaaacacataacatgttgctagtagaatagaaaaccgtgttcaattagtgcacaacttataacacagtataattgagtggtttacacctttttgagtggtttataagcgctatttaccactcttagttctgagaaatattcttatatatatgattaatcataacatgctttaaaatctaactgcatcgtcgactatgcagtaagagattattttggagcttttccatggttattgctcccctacgtgtggatatagcttaatctaaataatctttataaatatccacacatcttacaaaataagtgtccaaatgtctctaaacttctgagatcattggactttagaaatatgagcatattacttaagattgccttgcaaataatacaaaacattcttaataccagtggtctagtctggatttaattaatactgccacgattcccagtaaaatgtatgccaaatctgtatgcatccagatttgagctaatctcaagcttctgtcagctgaatcataaatgattatctttataacttaatttcagcttgactaatctttaactgaattctctggaattatttctttatgtcaatatatgacttaatgatataaacctagtactccttcagaccaaaataattcatggaaaaatttcctttaatttctaacagcaatatgtattgcttgacaataaaatgtcattagtatggagtaccggtgtgaaatttcccacctttaattttcatgcagctgtccacctcacttggattgttcgaaatttccatcagagtcgggcttaatttcattaacccacttaaatggcccactattttgactcatttagaaacttctactaaattctttattttattcatcaatctcaattatccttacatggttcgaaaaccatttagatgaacactttaatgtcttattttgttcatccatctcaatttgttcttacatggttcgaaaaccatttggatgaatgcttatttttaatgtcttataaggtgaacaagctttatttagtgtttaccaccataatccgatctcataacttcatttgattttagctttagtgtcttaaatttcttaaaggaaatcggaggtcgctaatgggtaaacatagccataaaaaatcatttgttggctaatatcttaactttgtgaaatttacacttaaagctaaacaacgccattaaaatttaagggaaagaatatctctatctcatgagacgtttcaaactcccctaggtatgtgacataagcgacaatggcacaatttcaatgacgtcttacttccatcattatagaataattattctcctcattcttatttaggcttagttcactaatgacgcagcggaatttaaaacatcatcaatgtttgattaagtccacaaatggatttcttaagtctgtaccctatatgtgacttgtatttccataacaaaaccctcaagtcatgttatgtatatttaattgtgcaagtcacaaattaagagatacaaaattctagcgtccacataatggagctatgagtcataaatgaggtagaataatcttctcttattagagcttttgatgagctcccactgattgtattatttatttaatggaagcataatatcttatttttcataaacttgaatcacttaattttacttagtaaattatcatttaagtaataatagatgtcagaaatttctaagggtgaagtgtctcgaccttaatgagacgtatattctcccctagaaatgtggccgaaaaaataaggccataatttcgacaacgtctcataatgattcaagccaaaataatgccattaaatcaggacattaagcatgtccctatttcttgcaaagaacttacacaagaaaatttcaagagtagcatacataggacatagaagcagtttgaattccccttgcaaggaatatgagctttattatcattaaatttggaagttgcaacactcccccttagtgaagcttcatctttgccatcaaatgacaagattaacagaatcttacttagtttgctccttagtcttccatatttcttattgatttgcggaatgatgaaccaagtcaattatggtccactttgtcttagtattacaactctgaaaatgaccgtagtctaatgggagaagaatcatatgaaatggacaagtggcgcatatgaaatgtgcgatgtacatctcactaagtttgcacgccatgtgatttatttcttgtgctactttttaaattatactaagcattagttttaacaaacttctaaagttcatctcaacgttagctagatacagtttcgcaatgtcatgctcaaaattcacccctaacactaacagggatgataatctcaatatttatgagtgacatgcgaaacatagcattatattggctaaagatgcctcttgagtttaggaaaaaattagtggcattagctgcgggagccacaaggaatcctttgttaatgctaagtcatactcaaataagccttaggctcagttaagtcaatgaggaataataataataattccatagactttaactgataaataaaattaagtggcactattattgtggttgcttgtgcaaattacgtacaatagcacattaacttacacaataataacttaatctttatttcgctttgtaccaccgttgggcagagaaaaaacgaaggaattaatagatgagattacttataatcgaaaatcaagtcaccgttgggcagaaatgattagggaataaacattaatgtcttaagtcacatcaccaaaaggtagaagtgataaagtaaataatttaaaatcccaaatcaaatcaccatacggtagaaatgattaggaaatgatgccattagtgatgccatagaattaaaattaaaatccttagccatatcagcgttgggcagaaatggtaaaggaattaagcttacggatagattagatcctcgatcacatcaccgcaaggtagaagtgataaaaggagttaatgcactaatggcataaataaaaaatgacagagaaaataataattgataatactttgatttcttcccttaattacatcatcgttaggtagacaataattaaggaaataacaatcttaatgaaatcatttctttctagataaacttcccgttggttccatttatctagaaataatttactcagtattgcaactgatcttaaataataagcattgataattgcatataattagtttactatggcttaatcaatcatgtgcaaaataaacttagaatttcatagtcaaaacaccattggtcataaataattatgagtaatcttaaaattaattccttaattatatcaccatttggtagaaaatacctaaggaaaaaaaagtataattgacatgcatttataataatgtgggttaaatatatattcagatcttaacgttttctagtcgaatttctcgttggttcaattcgactataaataattaagttactaaggcaatgaccatcataatgatgttgacatgaaatcataaatactttctagttaaatttccattcaactagaaataaattaagtggcttaaggaaataataatcttgacatgaaatcatattaacgttggtctggctaaacttcccgttggttctatttaactagaaataattttttttgagtgatcaaataattgaccataaattgcgggcttaaaataataaatggcgggcttaaaataataatacggcccatcacttccatgaatttctttccagcaatttaaatggctaagaaagctcacaaatgaatttctggaaataaataaatcataaatggcgggcttaaaataataatacggcccatcacttcctaagccggcccataaaaagggggctaaataaattctgagaaattaaattcgcgggcttaataaattaaaataaaggcccaatcttatcaaaaagccggcccaaaacggaccggcccatttatgtgcgcgcgcggcgcttaggtggacgcggcccagattggcgcggcccatgaagacgatggcccgatgcgggagcgaggacagccgtctgatcaaacggatggccaagatttcgcctttgccactgaaatcgctgaacgggtcaaaccctaaccctagtccccatttctccccttctctcccccgatccaatctcccggcgagcaagcgagtggaatcggcggcgatcatggcggcgacggtgttccggcgaggcggcgcgcgcgtgcggcggcgagcgctgcagcggctccacctcggctggctggggggcgcgcccgagggcggccccaagccgtgtgctatggcgtcggcggtccgacaaggcggcgcgctagcgacggcaagcgtcgatgcggccggacctcgtcggcgggggggggggggggggggtaggcccgaaggcagccgccaagccgacgcttcccgaccccggtgagggacggtggagagacgaggtccaaggcggcgcgcacacggcggtcaaccggcgcgacctcgaggagtccggagagctccggcaagcttagggggtctaaatccagtaattaacccgaactcaaacctaattttgacttgaatttggatttaattcgggtatttgtgacttagggttcttcccaaaaaaaattagggttcttcatttggggatttagggccgattgtatctggcttattggggatttcggaaaatttcagtcttgtttatccccttttgcttaatagtggggaatttcaatctagtttatcccctatttcttggtttgctgagtgctagccgaaagattagcttcggtctaggaattcttagtgtgagaattgggaatttcaatcttgtttatcccgaacctcttctttctctcaaattctactactaagcaacgaaattaaactcttcattaattgtgtttctactgttggccgagacaaccagcataacatggcttaatacgcaaccaagacttaaggaaattaatctaatcttattcaaaattgcatcatgccgaatcaatcttgaactttgtaagggtggcttctaatcacagggatgatgtgattatgagggaacatgaaggctaagataaggctctgataccacaatgttgaaatttaatccaattaattaattgagtcttagcctaaacatgatcaccttctgcttatgcggaaattaatttatctaactgacgtgagatgaagccaatgaagccattgctcttcttctttcttctttttgtttcttctgttgtgagatacctcacgaacctctttcagtgtttaatcgatcggacgatttatttagggtttagggttagagagagttgagtcattacacagcctccctcctctttctttatatagcgacactggtagggctcgggggtttatctcaatctaaaattcgaatctattttgtaccgatcacacaaaacagatttatctcttagtttgtatcttattaggatagaaaaacccgtaggattttaaccatatcctaactaaccggcattagccgataaaatcaaccaacagacaccggcagcggccgcggccgcggcatgtcgttcgccgcggtggggacacgcatcgtgggcgtcggtgtggagttgaccaccgtctacgaccccgaggcctccacggagcgcggcggcccgcgactcgtcttccccaagttgaaccccgtcctcatctcgatctcggacgacggcggcggcggcggtggcggcggcaagctctacgctctctcccgcaccccggccgtcgtgaggcagctggatttcgagccatggttcttcgtcctcgacgacctcagccacaccgtgtggcgccagctgccgtcgccgccgctcttcccgtgccgcctcaacccgctggagttcctcgacccgcccaaggtgcgcgtaacggcgtacgccctcgtcggctcacacatcctcctctcggtgtcggtgcagccgccgcagcagcagcagcaagatcacaagggcacatgcgccttcgacatggacaccgagcagtgggagatggtgcacgacaccaacctgcctttcgacggccaggccttgcctctcggcagcgacgaccaccgcttcgtcgccgccgccgccgacgttgcggtgtaccgcatggtggtggggatctcggccgtcacggggaagaaggagctgaccatcgttgagctgcgggtggtggtggcatccaattgccgcattgttccgggcaaccttctgtgcgccatggggaaggggagcttcgcttctttcgagttctgatccattgctgctgcttccgtgggaaaggtgggcaaagcacgtatcgttcatcgcacttactctttggtggagaatactacggatgatggtgagggcgattgggtcgtcatggtgaagaagctggatcggcaggtttacaagcgacgtgatcgacacgcatatttggcccatccttcttgggcggttgccgtttttaccatgtaaaaattttagagcctttcttctgcttgttctaacattatgtttgttgcaattaaatttttaaaataagatttcggatgattatattttaataaaatatatatatatatgacaaatggatcctactaacttattgcttttcccatccatgctatatccctccaaccaaataagaaattagatcgtcatatccatacaaatcaaacaaaaaaattgaatcgtcgaatctaacaaaatatggatggccatatcccatccatgcattgtggggagatagagtgagaagaaaggaagaaactagagattctgcttctgctttcttttgttatactccctgtctgctcctatttcagtgttcttttgtccttttttcccacctgtctgctctgcttctcttttttttttgactatttgttacactctttttctataggaaccttatacgtgactatccatttagatttgtttgtttcttaatattaagaagttcaatggataatttgcaatggaagtggattctttttaaagaagtatagaaaatatgaaaacaaaaatttagaataatcaaaaccattttctaaattttatagaaaatgtgaaatttgcaattagataaattcatagctctcaatgtccccccgaaaaaaaaaaaccccgaaaaaaaaatgtccacacgacgggcgagcacgggtgggcaacgacgagctatgaaatttgcttctgctgcttgatgcttcacaaatcaattaggccaacggatgtgatggggttgcagttcataccttgccggcgcgtggtgaggatgtctcggttgatggctagggttaaccgtgctacgggaccatgtcacattaggagatgaatttggggagcccaatggtcatatatatatatctctatctcttctcttctctactacttaaaaaatacgaggtgcttccatcgtccaaaaaaaaccgggtaaaaaaaccgggcagaaaaaaccaggtttgtccaattaaaaaaaccggaacggaaaaaagaagtccgatccagaaaaaaaaaggcgaaaaaaaccaaaaaaaccggaccgaaaaaaccaggtttgtccgataaaaaacaaaaaaaaaaagtccgactcctatatccgtaacagtgaaaaaaaaagtgaaaaaaaagtccgactcctatatcagattcactcttacaaaccaaaaaaaaaagtcttactcagattggtgaaaaaaaattgatgtgccggattgaagatctgtttgcaaaaacggaatctacatgtcgagagcattctatgtttatatgattttaatttttggatttttacttttatatttgagtccaatttttatatttacatctgagtccctataatcttgcaataagctacttgaggtcttttttgttaaaaaataataaaagtgagagaacaaaggcagaaaggtgcataaaaagaaaaataaaagccaaaaaaaaagtctgacttagattggtgaaaaaaattgatgtgccggattgaagatctgtttgcaaaaacggaatctatatgtcgagagcattccatttttatatgattttaatttttggatttgtacttttatttttgagtccctgtaatttttatatttacatctaagtccctataatcttgcaacaagctacttgatgtcgtttttgttaaaaaaataataaaagagaaagagaacaaagacagaaaggtgcataaaagaaaaagaaaagccgcacaaaaaagaaaataaagaaaaaaataacaacaaaagtttttttttccttactggcgaaaaaaactgtagatccgacggaaaaaagatttgattcatataaaaggcaaaaaaaaaaaagtggtgacaaaaaaaacgctagatccgaatcctttaaaaacagaaaaaaagtttgattcctataaaggcaaaaaaacatctaaaaaattcgttcgattccctaagaaaatggtgaaaaattggttcgcaaaaaataaaaagctggttcatataaaataaaaaatgcaagagagaaaaaaatagaaacggcgaaacaaaatctgatttctaaccagtatatatctcttctctatctctaatctaactatttaaaaagagaaaatgcatgagaaaataaaaacggttaaaataacgtgtgaggcaaaagtcaaaaaaaaagcgcaaaagcacgctaaaaatgttctctatcatcaataaaaaaataaaaagaagcgcgagaaaaattatttccattgtcgataaaaataaaaagacgcgcaaggaaaaaactatcgaaaaaacacgccatttataaaaaaatggtttttaaaaaccgtgcaagaaaaaaacaccgtctattaaaaaaatcgccctgaaaaaactgtcagaaaaaagctaaattgatggacgcttcagtcggataggatccatcgattttttgccatctactacatggctttattttgtcatatattctcctgtattgcaaaaaagcaaaaaagaaccatcgaaaaaaacaagcaaaaaaacgtgccagaaaacaagaaaaaaaacacacgagaaaagaaaagcaaaaaaaaaaggagaaaaatatggttttcttcataagtaaaaaaagcaaaaaaaaacatggtaggaaaaaactgtttaaaagaaatgtgccatttctgaaaaatggtttgagaaaatcacgcaagaaaaaaatactgtttgtaaacaaacaagccgctcattaaaatagaaacattgtcattaacatgattatgcatgaaaaatgtatattattattagaatttttttgcccgttgcaacgcacgggcatttttgctagtgtatatatatatgtatatatatatatatatgtatatatatatatatgtatatatatatgtatactagcaaaaatgcccgtgcgttgcaatgggtaaaaatatttttggatcgctatacgttttactcttttgttttggaccgctacctccctttgcttggtctgtctctctttgacccaacccatgagtggagcatcggtcccactcgcatagcggactgccgtcttccatccccggaggagggtcttgtgtccgtacaatgccaaaaccagtcctccctatcaaatccggtcgaatcttcctggtcatcaaatcaggtcgaatctttctcgatctttcaatattggttaagggtctcgtgtctgtgcaatgccaaaaccgatcctccccatcaaatccagtcgaatttttctcgatcttttaaaattagttaatggtttttgatacactttatctcctcactcgggataagaatggtgacttttaaatggagattaaattctgtgaatacaagggagtagtgggggatcgatttttgcaatcaattggaagatggaacgcatgggggatagatcgactatgcttggaagacaggaagagggaacgcatggggagacagatggatgaggcggcgatgctagggttcggccgagcaacgaaaaaatatggcagataaaaaacaaatcctttaccgcatgcgaaataatacaataatagtgaaaaaaaaggtgaaaaaaccggaaaataaattaaaaaaccagcagatggaaaaaaaaggcggatgaaaaaaaggcgggaaaaaaaggacggaaaaaaggacgcgcctacctatcgggcggccgatccggcgccggggaaatcgggcgctgacgtcagcatgacggacgtctgcgtccgatttacgtgcaacactaatttaaaatgatttttctcctaaattacatatccaaatcatgatcccattgcaccattaaattcgttgcaattaaattttcaaaacaagaccacacatggatatattccggtgaaaaaaaattagcttattattgaattatttttaaatgttgcatgatgttccaccaggtatatcggaattgtttcactaagtagagcgaaaatgtttcactcgtttaaatcgggtgttgtttcaccttatataaaaacaatgtttcagcaaatagcgaaagaatgtttcagttcactgtaacattagatctatacatagtgaaacattatgtgtacactaggtgaaacatttttcggtggaacaaaaaataaaccaaattcccttaatagggggtttctaaaatatgtgggtttttttttttgcaatggaatgtttcgttcactgcaacattagatctatccatagtgaaacattgtgagtacactaggtgaaacatttttggtggaacaaaaaataaaccaaatttccttaatagagagtttccaaaatatgtggattttttttgttgtaaaagagtattttaattcactgcaacactagatcaataaatagtaaaacattataagtacactaggtgaaacatcttttgtggaaaaagaagagagaagtgagtggaaccaacagtagcatgtggggaggagagcgcgtggggggagcacccgattgggctcacccgcgccggtcgcccggggacaagcgttttcacggaaaaaaaacagcaaaagaaatagactaacgaagaaaaggaaacaacggaaaaaaaatgacgcaagaatcagatttcttttttttttgccgttctttacgggtactttttgtttctttatcgccctttttacgggctttttttacggacttttttctccacgtcggactttcctttttttttcgcccttgcacgacggaaacatctctaatcgtgcggatcggatggaggagattgaaaaaaaaacggaaccaaaaaaaaccgcgacccactaaaaaaatcagatgaaaaaaatgacatgcggagaaagaaaaaaaccaggcccacaaaaaacgcgtaaaaaaatgatcggacggataaaaaaaatgacgactgaaaactgagtcggacagaaaaaaaaatcgtgctattgcttttgtttgctaggaacggagtcgagaaaagatcgtgagctatcagcagtaacgtatgaaatttgtagataaaaacaccttaaacttttataataagtaaagatatatattatcgagggaactattgacgcaaacacgaggattaattaattagcaaggttaaggcacatatagtcacaagacctcccttctccactcaattgacttaagtaaatagaatcgggaaagataagatggagtgcggccagttatgaatatagagagataacaagtttaacaattaaaacacttgagggaataaaaaaggaaaagacaaaaatatctgttaacacaatagtcatatgcactttcatatgtgtgccttctttctactaccattctccttggctctctagcatttccagtacaacagtagaagcagccctttgttcttaattacctatatgtgccacactaccaccgttgttgcaggaggtagtttccctaaccttaagcatatccaacagatagtcgaaattcactcaggaatgggattgggaagcctttggagatgcgcctatatatacttggatggaaccaaccctcggatgcctatcgagggcttccctaaatgcaaccatcacattattgtaatcatatgtgattatgacgtcttcgaggttgtgaaggtgctgaatgccaactagagacctggtatcttgctctgcatggccaaaaacaatgagatgcataattctaagctttggcattgctcctggctcgatcgacaaactggaagatttatagatcaactttagttctttgagagctgaaaatgatacactgtctataataatctccatgccaggaacctcgatcgcttgcaagtcaaggtaagcgaggcagggtaaccttgtgagaacacgcatatcatcgccctcgagtttgtcaacaatgagacgtaaactagttaaagtctcaacctattgtatccagtatggaaccctgaagaagaatatcatgtgagggtgaaacttctgaaggaattgcggaggaggaaaccagctatacaagaagccaatgggtggttgtctgtgctccattagagcaacattgaaatctagacagcggacgttgcagctgcccagttccctaagggaagtggcaagagcagcaaactttaccatatctgtctggtcatcttcatcgttgcctcgacggcgattgtagatgacaccaagcgtccttagattggtcagcatcccaagatgtcggatgttttcaacagaacaattgcagaagttaatttcttcaagtgtacgtatagaggtcagcctgttaatccccctgccgagctctgcattccatggagttctcagatgccgcaatgatggtaaacaagcatcactcagaaacccaccgatgagtacgagatcaccgctgcattttatgtcaaccacttgcaaatatcgcagttccccacttgtatcaggaaactggaaacgattaccttccaatttcagataccttagttggaaaaggttacatacaggagacaaatcatacgttgcacggaatggaaaataaccttccattctcagatgtagaaccctcaaggcttcaaacatctgaagacgaggcaagctttcaccacgctgatgcagccgatccccaaaataaatgacggatcggacttgatgtaaagactcacttgcttggatcaagttaccacggtttgattggtagctgagtcggcgaatcaaaaaattatgtcgtcttaagcaatcttgatcagtcctaattacagtcacaaagttttcctccgtggacttctcaacaataagatcaagaaacaaattgtgcacaacacgacaggagacaacctcaccatgcttaaactgagctggctttatcaggcttctatttatgaggtcactgaagtagctctcagcaatatcttctaagtctcggttatctttttgggtaataaatccttctgctatccattgtctcatcgagtctttcttcatgatgtcatagttttcaggatacatatgaagatatagaaagcacgtcttcagatccgaagataaattattgtagctaagtttaaggatatgcttcatccatttagagttaggatttctttccagttcaaaccccatagagtattttatcttcaaccaattatccagtttgttaacttcttcttgactagccaaaagactagctatgacaactacagccaatggaactcctccacatttctttaaaatatcaatagcaattatgagttcttcaagttcagggctgtagttatctgacccatatattcttctgaaaaataagcttctggagtccgtccaacctagtggtttcatcttatagacaatgccatggaagctagagcagcaggcattagctacatcctttcttcgtgtagttgtaataattctgcttccgctgttccacgtttcgacaaatgcaccactaatactgttccatgtttctatgcttgctatgtcatcaattacaactaggaacctgagaaaaaacatagcaataatcaatagcggaaaaccatagatatctatagaaaaccatatcgagctatttttggttataaaccatatagttaacttctggccttcagactcattagtatatctatatctacaccaatcctgggcattatattgtccagataatacactgttaaaatttctatcaagtctacatgcagatagaaacggcgactgaatgcagcaagggtatagaacatgcgctgcgacagaaaatattagtacagattcgtaacgcccattgcaaatggttctcggttatgagagttgagcatattcagcagtatggtcaactggtcaaggtgatattgttatttaacatcttactaggtgaaagcaacaagctttctgcaaggaggatgagacacgtaatctaaataacatggaccgttggatggatcttgtaaaagaacacaccgttcgatcatctatataggtaatttatgttggaccaattaagaggcttatatgtgagtggaaaaccatcaggccaatcaagaggcttccagatgaaaggtctcaacaagtagataactcatgtacctagattttttttttacatagtacaaacattaaacttcttatcaaataaagaaaaaaaaggtaaatgaagctagctcagccgtacattcgttctgaatttattggccgccatgattatccttaataagggaattgtgataaatttagcatgagatcacattctttaatttcccagacattctgtggtcacatgtggatggaatgtcctaaatatgtatatatgcctatatgtaattttcaaatattctcaattcacagtttatatgcatatacaaatactctaatataatttctcttttaaaaaaaatactctaatataattttggtttatattggaacacactacaccaaatttgacatggcacctaattggcatacaccatgaagtaccattttttaaaaaacataatacaaacacacgagctcatatacacatgagcacactagtcactatgaataaacacgtgtacacgaaatcgttataacaacttaatgttattgctccttcgtattatattaaatatacttatcttttacaatcaaaatttatcgtaaaatgcagctacttctatgcccactctctcatctcaaccaaccacaagcatatcctatttaatttcttcgcatactttctaatttcaaccttacaaccttcctccattaaattttacccctcttcataataatcactaaaaagggtctaaaggtaactactccctccattcctagaaaataaatatttttagtattcaaattttatatacaaatataaacatttctagacattgattctaatgcgtgaaaatccaagcacttttagttaaccagggaaactaagcaattcaaaattttaactttgacaataagatgattgaaagagaacactttccattaatcttaaactttactaaacaaactagaaatgcttatatttcccactaatacagacaggttatgcgaagctcagagtcgcgcgaagtgcgactaggtggctagtattactgaaaacaacaagatttataggtttcaaaagaatgccctaaaacaaaattagaaactaccagtaacatgctgatagtgtaataaatcaagataatttagtattaaaccttagacattaagttttcagaacatttatttagtgaggcattttgattattatcagcaagaattacacatgatgattatcagtttgttgcaagaataaatttatccatttatttttattttagaaatattttgtgacaagaaattcattattcatcaagaaacaaagtggctcacactcaaatccaacagtattatctaaaggaccttctgtagtccttgttgatatagtacctagttcaaagtccaaacctacttactcattgttttagcaatactaatattgttcttgtctgcaacagtacagatcttgcaaactatagtctttttatagtacttatgttcaacagtattaggaggtacaaaattaaatttgtagtttatttgtggtataatttggtacttatgaagtatcaaatttcacatagaaaaatatggtaccacccagtagctttatcaagtacgtaccataaatatctcacaagtataatgtacctctataagaaccttaaagaactattcaattgttgttgctgctgctgcatgctattactgtcgttatttttgcaattttaaacctagttcaatgttatactcaacataatttacattgaagatgaaatcactcatcaagtagtaagtttgtgctagtgtgactattatgatattcttcatataattctttttttttcatagcagttgctagaaaacattggttaaaatctgttgtggtgtttgataaaaaggcaaaattagttattcagttatttgatggttcttcatgtaatctttgcatagaatttgttcttttaccgggaataaaattatcatctcccatcacagcatgttaaaaagaaaagaagatatattccctaggaccaactatcctctcattcaagaattggccatcggctgattttgtggattgtggaactaaaaaataattcttctgacttgtgtgtagatttgttgataaacaaatagatgcaaattaaggggtggacttttttcaaagttctgaataaaaaggataacaattcttgaagagctttcataaaagtaaaaggtggtgtaggagtattgtgaaaagaaagtattaaacaaatggggaatggacaagttttgcgaggaagtttgggttatgaaagttcctttttgtgagtagaatatcctaagctatatattattagcaatcaacaaaagcgatcagttaaagatattgttttacaggaggccttccaaagaaacttcactgagaatgagcaggatcatgcatgttgagttatatgttcaatactggagaatgtaaaattaaactttgacagggatgaattatctttgcctcacggcacaaatgggagatattctctacaagatccgtatacataatatataatacatatggttttatatggaagagttttgtgtatggcaatttgagatagattaccccatggtcgctctcttttacctgtttttatataggactgttgtattggcttttttttttaaaaaaaaaagtaaagttgaattgatattctggtgagtttctcaactatttaaatcccaggccattggacttggcaattcttacaataattccaaataagatggggctggcaacgaactggttccactataatttttttaaaagaactatgaaactatttatgtagttacctaggaaatatattaagatctcgcatatgtcttttgctgtaacaaaatatttgtgtgttttttttttgtatatgtggttcctctttcatagtttgcagaagaatatatatttaccaaaacaactgaaacttgaagaaaaacattggaacattttgcacaagcttttgtcatataatgttgggaactacaagaggcatctttgtccataaggccattatggccctttttttttcagaagcatatctgctgatatggtccattaacatgtctaggaaattgatttatggattgtatataaggaatagagagtaactaaatgcaaataattgaatggtactgaactgagtgtcaaggaatataattctctttaaacaactaactaggaaatatattccaaagtactatgaaatattataccaaactgtttactacacagactttttgatggtacaccaagttactgtgatccatccattgcctattgggatatatagttttattgacacaacgaaatagaaccatagaagcatatgctctcatacctcttgcaagagagtttttctctggttgcattgatgagactttttatgccatcggccgatccgtcatatctgagttgcgaaagaatgtcatttaaaatcattgacgtgctacggtttcgtgatgcaaacacaaacaccgcgcactcaaatctgctatgaattttcttgtagacctggctggccaacgttgttttaccaagacccccaaatcccacaatagagaccaccttaggatgctgtactgactctccttccatatcctccattaacaactgtgtaatcacctcacatgggacattgataccgacgagcctatttgcctttccacacaggacaggtgaaatatcatcgatttctatctgcctcgggttagagctaatagactcgtcgagattgtatatactctctactcttctgacttcctcgacaacataatccttgatttcgtgaattttttcaaacaagatagggagcatcagatccatcgtgtcagtgagcaaggtggccttgtcagctacagtgccaaaactgtgcatgaacctgtcaattctgtcctcaacaaagtaggctagctcacgtaccttgttcctcagctccctcttctgaatattcagagcctccatgttaggcagcttctgtagtagagcattcatgcagctcaattcctctttcaagtgccatatattgttcttgaaatcaaattcggtagaaaattggatctctttcaagtcgtatcgacacacctcttccagcttcaccaggagtgagttcatcaccccagtcgaaatgttcacggccatgcctcgatcaatccctctctgtctctgctctttcttgatctatgcttgtcaatgatcttggcactgcgtttgactgtcagtagctagcagatcaaccctccagttatataagataagatactagctaattaattgtcttaattttttttctttgaatgacagctaatttggtacgttcacgtactttcctacgtgaagagtattgtacgtcgatccgtatccaaaaaaaaaagaaccgttgaaaatcttaaaattattgctggtgatgcccatgcatgttctctctgtctctctcttaaaacaatccatgaaagaaactgctggcaaactttctctcgttgaccatgtcatcataaaacattttggccacaacccacgaggatcaatttgacaaatcttaatggttctacatctagcattacttagcatactaggtaaaaccccgcgcgttactgcgggaatttagaatgataaaaataattaaaggtagtatcaaaaaactgccacaagtttttttagtaaaaaactttcgatgtaagtgtaactatactatatttgaagcgtaactactgcactgtaactacaatgtaactacgatataataaacttgcattcaaccatgccctggttagctagcactaaaatcttacgcgtgacatgtgtgaaaatttatttctagcaatttttttcccttcatgcacaaatgtcgaggcgatcggatggtcatttatctaaaagttttgggggcaaaaacttttggaagttttatagcaaatccgataagtaaaaataatgtataaaatagctaaacaacataaatttatgtaagtcggtgtggttttatgaaagaaaaaaagaaatagataatatggagtatagattaatcatctacgggttaaaaaaattaagatgatatggcttgataagaggagagaaaaataatattaaccgaggatgaactatataggtatatagtatatttaaaaaataatggagagatatattgaaatattatgtgaattatgtgcgatgataatttaacatgcttctattttaaaactccaaaatttaataaattacaaaatatagataatatagcatgcataatgtttaagtgtaataattgttagtacataatgatgtaacatcttttgtatgttgagttttagaatttaatgggttgtaaccttttagtaagataggatacactacctcctgtcgtgaataagtgatactatggagtatggacggagcaactgatcaccaaaacactagtttcattgttaagaagtaggagtataaagcatatgaaaatatagcaaagttataatattatttgaaactaattttgaagataaatctggccacgacagttttaaaaaaaatgatttgagatatgacaaaaaatatgaatgggcaagatttaaacatattgactgcagacattaaaaaacacttcacttatctgcgagctagatggagtaattttccatgccacgaataatgactgatgatgttgctgccttctttagttgaccggctaaccatcacaacataatcccaccactgttctaaccgccgggcacatgacaaccctctgttggttggaacgaattgtacgtacatgtatccatcataaatatttgatgtttaattgtattattcgattagacttttgaaacgttgatcataaataatttcacaaatgttttagataaagagatggtacaggtagatttaatacctagcgttgcccacatttatattagatgctaataaatctagacatatatatgtgtttagattcattaatatctatatggatatgagcaatactagaaagtcttacatcgtgaaacagaggaagtaatatcataaacgtatttaactttagaaatttaatttaatcaactcttgtctttaacatcgaaaggagagtgattcttcttccttttaataatagaaactggcacgctcttgtgcctatgcaataaagaaatagttacgaatggaagtcaaattccattcctttgccgaattaagcataagatcatcttgaggggtatcctcaagggaggagaatcttctgacctaacacaagtggtagatgctttcacgctcttcaacatagaatagctggttgatcaaccggtacaacgtattgctaattaggagtcccaaatctaggacagcaaatgctgagctagcagaaaataggcaatactattgattaagtcgagcacgcacctaccagctctaagcctctgacactttatgttcttagcttcaattaacgttgaaagatgcttatggtagagagttacatagtgaacaaacaaaaatgagcaataaagaaagggaacttttacggtacaatatactatacttatgaacgagggcacgtttggaatttgccaccaaatttaaaagggtattttagtaattcgtgattcatcttcaatccaatcgtcaaattaatcatagatgtctaatcaatctaaagcggagagacgacccttggcattggtagaacgacaaacatcggcggcagtgtgtaggcaatgacggcatgcaccgcggggaggccaggtacaacgggaggcgtggctgcggtttgtgatagtcttattttcatgacaatatgggtaggctacaatagcgagcagctccagtgctcagcggccattgctgccatccttaatccgtctccccagccttggcacccctcgcgctggcctctagttcccacatccatgtttcacaggggtgtcgctgtcgctgcagaggaacaacacagctagcatcatgcggtaggcgaagtcccggttggcggctcgaagccaaagacgccgaagagaggagcacaccggtttagtttttgtacttgatggccttgaggaggtaagagcggacgccctcgctgtcgccaacaccctccccaccgccagatccacgtgcgcacgagggggagagcccgccgggttcgccgtcgtcgagctccccagcgccagatctgctgccgacgagctccccattgccaggtccacagctgccgggttcaccgtcatggaggaaagaggtcgttggccactcctgagatcaccgcttgcacccgctgcatgtgagggtggatccgcccttctgagcccgccggtggcggatccgcccttcccggggagagtcgttgccagatttgcagtgcccgttgaccgccacctctgccaccctatgagccgaccaccaccgtgagagaggaagggaggagatgagcgagggggtgagagagggaaaaggaagagatgaggagaggaggaaggggaagcggcgaacgatggttctggacaggcttgtccctggggctgtgcggcccgcgcgcccgcacaaggccccaattttcaggggcccctaggcccaaaactccaacactatatatatatatatatagatatagcccaattagccctaaaaatctgttatttttttcatgttttatttacgtcgtttcgcctcggttttgctaattggcgcagacgcgcgagatgccgagatggtcaccagggcatgcacgcactgatgcaagtggtgatttatcggtaactaatgggctaatccaattaggatggtgtgattagcgctagcttcacgtaattagcttccaataatgataagcattaaatacgcgccggtgaatcaaattggcacgcacgcggttagtattttcttttttcccgcactttcttttcttcccggagatgtttatgcattaacaacgtaactaatttaatttgattagttttagataatgatgataataaagataatattttttatttaatgttcttcttttactaatagattgaaaagaaaactatacgtgaagttaaattttgaaaactttttaacccatacttgaaaactttcaactcgaaatttgagtttttttagacaaaatttgaaaactttcaacttttaatctcaaatttgaaaaacgtttaactcaaatttaagactttcaacccagatttgaaaactttcaacccaaaatttgaaactttcaacccagattcgaaaaccttcaatccagacttaaaaactttcaactcaaaatttaaaaactttcaactctagatttgaaacgtcttttatattgaaaaacttttaagttaatatttaaaaacttttaactcaaatatttttgaaaacatgtgtgctaccaataaaaaaatcggaaaaaaaacacgaaaaaaaggataaacacgcgaggggtaaggaagaaaaaaagataaagcgaaaaagataacgaaaaaacaagaaatagcgtggtggaaaggcagaagggtaggctggcgtgctcatcagttccgttagtggcgcgcccacgccaattagcatcccacgtttcgcctttgattgtggcatggcacgatgggcctccgcctcttgatcgcggcatcgcttagaaaacgaaacaacgcctcgcctccctgactctttctccgttcgcatctggcgcactgccgcgatgtcatcgctaagtcctgatgccgtgtcgccgtcgctacctagaactgagaaactggtgctggctgtgacccatcattggccggcctgcctgccggagtccttgtcggctgcaacgcctgacggcctgatcgtctactctaatcagcaatcaggtaatgtaatccactaatccctattctctaattttagtgtatcatgtatggattattaggtttttaggctcatctactatatacactaaatcaatttttatccttacatagatacatcctgtattttaattttgaagacatgtcttcaacaaattggaataggaaatatactatgcacatgtatattattttagaccattttacattgctatgaaatgtattatagagtataaattattgttgtattatatcatcaattaagtttttattcttctttactactgcacgactttgcactggggcctcaaatttaataggatagccctggttctggagaagagtagacggtgcggtggagagaaggaggaagagaaaaaaggtgcagaaaaaaaatctatttcctacttgcccgcatgcaaaattagtttttttacatgcagtccttaagaagcctttgatccatctctcgggttaacttttttttttcatgcgtgaacagttatggtctatacctgtaatttggagggatgtcgtcctcgtttctgtagtagttgtagaagtgagcatgcttaaaaaccagaaaaaagaacgcagcaatgctatcattcgcctgttgcactcgcaatcgaacgttccaaaaagaaaaaaaaaatcctgattgcgacggggagtttagtagtaggtgagacgcatgttgcactgccttggcggcccagtctcaagtagtggagttgtaacatttggcccagtctcggctaggcccatgctgtcctccggccgacgaaagcaaccccactgggatagggtttcctttcatcacgtctttgatacgtaaatccgaatccagtcgagggaagaagatggtgacgccggacaagaagaggaggaagaaactcgcggagccggagccgacgccgacgccggcgccggagccggtacctcgtctcctccgcgttcgtccagggaacaagaagaagaacaagggggcctcacctgagaagcagccgccggtgtacatggtgttggcgcacggagtcgaggaagagcccaccacccactccgtaatcgaggtcgccgcctgcgccgccgcccgccgcctgcttaacaccggcagcggccgcggccgcggccgcggcatgtcgttcgccgcggtggggacacgcaccgtgggcgtcggcgtggagttgaccaccgtctacgaccccgagacatccacggagcgcggcggcccgcgactcatcttccccaaggtgaaccccgtcctcatctcgatctctgacgacggcggcggtgtagtcggcggcggcacgctctacgctctctcccgcaccccggccgtcgtgaggccgctggatttcgagccatggttcttcgtcctcgacgacctcagccacaccgtgtggcgcgaactcccatcgccgccgctcttcccgtgccgcctcaacccgctggagttcctcgacccgcccaagttgcgcgtcgcggcgtacgccctcgtcggctcccacatcctcctgtcggtctcggtgcagcagctgcagccgcagcagcagcaagaagacaagggcacctgcgccttcgacatggacaccgagcagtgggagatggtgcacgacagcaacctgcctttcgacggccaggccttgcctctcggcagcgacgacgaccaccgcttcgtcgccgtcgcctccgccgccgccgacgttacggtgtaccgcatggtggtcgggatctcggccgtcacggggaagaaggagctgaccatcgttgcgttgcgggtggtggtggcatccaactccaagtgccgcattgttccgggcaaccttctgtgcgccatggggaaggggagcttcgcttctttcgagttccggtccattgctgctgcttccatgggaaaggtgggcagagcacgtattgttcatcgcacttactctctggtggatgatggtgaggacgattgggtcgtcatggtgaagaagcaggatcggcaggtttacaagctacgtgatccatccttcttgggcggttgctcttttttccatgtaaaaatttcagagcctttctttgcttcttccaacatcttctgattcgttgtcagcgtctattatatcgctgctaaggccttgtttagttgggaaaaaattttgggtttggttgtcacatcagatataccgacacacatttaagtattaaacgtagtctaataacaaaacaaattacagatttcgcagagatgaatttattaagcctaattaatccgtcattagcaaatatttactgtaacaccattgtcaaatcatggtgcaattaggcttaaaagattcgtctagcaatttacacgcaatctgtgtaattgtttcttttccatacattaaatgctccatgcatgtgtccaaatattcgatgtgacagtgtaaaaaattttgttttggaaactaaacagggcctaattcatcagcagctatcctttcgaaatttttttgaaaatatacgtgtttttgatcaaaattgcaagaataggttgattaggggccgtatcgcactttgatgtcgcaagagagcgatatcacttaatctacatgcgaaagccgcagcgctatcgctaattgaaatcgcgggagtgctaatgcatcggtgttgcatttgaaaatcgcaagagcgaggcggtcccgcactttcgtaaagcgatagcgcgggttgtccgacgttgtctgacgcacgtggggcacgaagcagtctcgtgctttgagtgagcgggagcgcgtgtggtattacggtctacttacgcaagaccgtagcggcgtggctcgtctgacgcacgtggggcccgaagcaggcccggagcggtctcaagctatgcgcgagcgagagcgcgcgcggtatcgctctctcctaggacgataccgttgcgtcgtggcccacctgctaatcggctactaatcgcgtaggaggcgacagcgacggcttctttgaaagagagagaccctaaatgcgcacccggagcgcgagagcgatcctctaaatgcgtttacatttgatgcgaatacccgatgcaaatcgttaatatttcatgtgtgatatattaagccgttgctatgtagaaagtataaactttttttttcatattttttactatgtgtgcaacatatatacattaataaacttgagaaatatgtatatattgaaaataggaaaagattgtgtacgcggctacgagaagaaaaataaatatcttagaatttgcaaaataatgatatcagttacagaaagagagaggaaagaaacaacatattagctatagaaaaatagaaattgaatatatatttattatatatatatatatatatatatatatatatatatatatatatatatatatatatgagtagagagatcattcgggagcaaatttgcaaagttcacgaagaatatgaatttagaatatatcatattattcacagagaaaatcacctttgcatattcacaaactcggtcttgtggcaagaaccgtgtagcgagttaacgaactacacagttcttaccacaagaccgggcctatgaatatgcaacaccgagtttatgaatttgcagtagtaggtcatattcacaaacggatgttggaacttaaaaaaagagtgggtgtaagaatctattaaaaaaaatcacatttgcatattcacagactcgatcttgggacaggaaccgtgtagcgagtgaatgaacaacataaagcgagttcaccagctactcagctcctgccacaagatcgggcctaagaatatacaacacgcagttggaaccagcagaacgtttatgaagaagagatgtagttgtgtgctaggtttggttgctatttataggggataggaagaagctgcgcatagtctgaattattaatgggttgtacacaggaattgtgaatgattagaaagagaagaaggcgcgtcggactgcttcactattcaattaataattacacagagatgacggcactttcgaagcgttagcctgcttcactgttaaagttaataattacaaaaggataccgtcacttttggcggcactggttgcttcactattttctttaataattagaaagagatgacgccactttcggtgcgtcggaatcttcaccgttaaatgtagatgattgcctctacgtgaaatgtcccgtgattggaaagagaggagaccattttaggcgcgtatgattgcatctttgtgaaatgaaattagtgtgtaatttaagtcacagtagtacacaataaaagtattatccaatttaaaccgcacgagtaacatcaaaactgcactattaatttaattagtgagagtattatttgtgttaactgtcgtacggaaaattattagttaacaaaaaaaatcataatgtacaaactaatatatagctcaaattttctctgacataattaaaaatgaatattaactaacactaatataaactaagtgaactgatattttctaaatcctccccgtacaaatttttgctaatagaaaaaacgtatcatttatttcttctctccactgtctcctctcttttcttgctcttcctctcctcctcagttcactcccttttctgtcttcttttctgtcttcctctgtgaggaccatctcctctcctctcattttatgcattgagcacattggattcgaacgaatagagcggttacgagctaaacacatgtggccgacatgatgtgactacaaaatagtaaaatgataagagagtgcacagaggtattccgcccatttccagaaaggaaagggagatggctatcagaacccatgcaaaaagcaaaaagaaaaagagagatggaaaataaaggtgtcggtggcgtcggtctgcgctcttttcctgcgctctgtacattggtctcgcgcgcgcaaagcgtgacagcgcacctttgccgcactgcatcgctcttgcacatgcggagagggagaccgacagcggtctcgcgcgcacaaggcacgacaccatgggcccactgtgctctacgaggctccatcgctctcgctcaagcggagagtgataccgtcaccggtctcacgcgctgaaagcgcgataccacgggcccactacgctcccccacgcctcgtcgctctcgcgcatgcggcgtcaccggtctcgtgcgcgcaaagcgcgataccgcgtgccgttctctatcacgtcacgctcggtctcgcgctttcggattacgagaccgacctcggtttcgcgtaacgacaaagcgagagcgatggctccgcccgccacactgcctcccaaatcggcgatttctccacgtggcgctctcgccctaccaaagagcgataccgctgcggtctcgctttccctttgcgcgatatcgccagctcaactccgctttcgctatgtcataccgcgatttcgccacgttatcgcactttctagtagtgaacctcggtatcgctcttccaaacagcgataccgaaggtatatttgtgcaaaaaccttcacaatccggtatatttttgcaaaataaattgatgaacagtatattttcaaaattttttcctatcctctcttttgggtatttttgccgattgcagccctagtccttctaggctctcctgtttcacttttatagcttaccccaattaaaaacgattttaaaagtcagtgtagtcaaactgatctgagttcgagttcacgtagctttatatttgcatagtatttaaaatttatataaaaacataaggccttctagcacagttcatattatttaccttctattcaaatttcgtctcatacacccatccaccatggtttacacttctatttttagccaaaatttcagaatttcagtggaaatcgaaatttctgaaattttggtactttttgacaaaattatttgaaaatttaacagattataaatgaatttgaataaactttgaacaaatttacaaaaatttggaaaaaaaggagaaaatttcagacaatatatgcatgtgcttgccggtggaggcaaaattaccaaaatttcattctgaagttgcaatccctgccaaccaccctctggcccaataattccttgtttaatgaggtgcactaaagtcttctatcctaaatcttagtctctagtagtaataaggccctgtttagttcctaaaaacatcgcatcgaatctttggacacatgtataaaatattaaatatagataaattaaaaaactaattacaaagttaggggggaaatcacgagacaaatcttttgagcctaattagttaataattagccataagtgctacagtaacccacatgtgctaatgacaaattaattaggcttaaaagattcgtctcgtggttttcaggcgagttatgaaattagttttttccttcgtgtccgaaaaccccttccgatattcggtcaaacgtccgatgtgacaatcaaaaattttcttttcgcgaactaaacaggccctaaacaacctacaaatgccaacaaggcctccagcttctgcataaagcaacgacaatcgggaatcaaatccttatgaacctatcgccagaggttgatacatcgatcatgtatatcgacatgtgccttgagttcttgaatttggagggcgatttgatggcgggcaggcacatagttgctttgatcttccggaccgccttccagaccagtctatccttgtcctctctaggatgaagttggtgcaggaagatgtcgatacagtcctcaatatcgtaggccagttcccgcaccttgtccttccactcctaagtcgataagcttctggagaagggaattaggcagctcagctcatgcttcaggattgcaatctctttttgaacccccttgagtagcttgtattcatcgccgagagcgtctgcataacaagaaataacttaggtcagctgtggatattgtgtgcatttatgtttttgtgtcaagtcagtcacaaacacaacaaggagattaagtagagcctgcagagagtagtttcagctggcatttagggggcattcaaagtttcggttggtacatgcgacctaacaactttaaataaattctccatgctctcattgaacatgtttctcttcttataaaagatgctactctcccctaaaaaaagggagagaaaattgtgtggtaaaatttcatatttgtaagtgcagagcctcactttagtgctgtttttagagctgatcactctattaactagtgtgctcctgtaaaagcagataaattggacgtgaaaggatctaacaaatggtaaagttcgcttttccaatctggaatatcaaaaaacctgaatttcccccacttcaaaaccagtcattggtcgaccttgaatttttggaggttttgtgaaagtacaagtctatggaattatcattcatcgacaaaaatcatgttttgaccaataatagcctaaatgagagatattgcaagtctgcaacagagaatggctagagaagtttgttaatataagtgcaaagtctcacagaccatgcttgtgcccatgccatgtaaggacttgaacatacacaaatacaagtaacctagacaggtctcgcaacataatacaagttcttaaatacaagccccaaaatttaatcgtactaaagtgtgatgcttaggtcgtgcaaacaagacagcagcaactgtggctgcgcttctctggtacgcttcatgtcgtagcgttcttctcccagttatggggaatactcaagctaacatattcccataaaacagcagcaaacattaattattgaagaaacgcagagtataaggatatcatgagtacctttcagcgctattttctgagtccttgtacttcaattatagatattaaacgtggcacgtatgtcttgaaaccttggatgcctttggacggcgtccctgtatgcaggcaccttgctggagtggcttgtcacttggacctcttcaagccttggtaggtgctcgatgccaataagtggagttttgccatgttgcgccgctccactggtgccatgcccttcctccaagttagaaggcttcttgtcatctagcttcagaatctgaagctgtggcattgcccctggctcaaacgtcaggcatgccaaatcacatgttaaaacaaatttctgcagctttgggaaattgtcggtatgggtgattcttcccaaacgcgtggtaacgcgtttagtgatgatgttctcaggggtagcttgagcagtcaagtcgaggtcaacaaggcagggcagcccagcaagaaattggacgtcgcggcaactgagctcctcaacacgaagctctagcattgtgagcttcagagaaaaccacagccaggatgggacattgcgaatgttcttacggatgatgagttgctgaagccataacgatgcaaaattcagaatatgcggtgaacaagcaaccaaatttggcgagaagaggtccgaatgtgaggaagctggtgtatccagatgctgagataggtagtccagaatggattcagttggccaaccatcatcgaaacttggaaactcaagggaggcagggggagaacgaagacctccattggtagaacgaagacctccattgttgaaacgacgtgtttttgccagtctgatagcagatgaattaaatcgagaaattttctccacaatagtaaaaatgtcgggcaaaccccctgaattaaaggtcaacaaagtttgtagagagaccagtttctgaatcccattaggcagcactgcatcacctgaaactgttagatgacacaatgatgatagagaaataacatctgatggaaaaccagtaaccaaaaggctgcctagtagatctagtgtcctcaaacactggagtctcccaattttctgaggcagctttaacctgaaacctctgatactcaagtgtctcaacaggaagaggttgctcacagcagacaaatcaaggaaaacggatgtagaataggccctaagttccaatacccgcaaatgctcaaacatagaaataggaggctgcatactgcagccaaacgcagggaaagtattataggatcgaacctgtgatagtttcattctttccatggccaagtttccgtatgacaactgatggcacagacgacgaactggaagctttgttacattctttacaggctgcttagatgctatagtgatgaagttttcctcctggcacttcgatattataaggtcaagcataaggtcatggacatgacatgcctcactggaacgataatcatctagcttaatcatactcctattaatgagttcgttgaaatagctctcagctgtttcctccagatccaaaccaggtttctcatggataaatccttcagctatccatagccttatcaaatcagctttgaaaattgtatggtcttcaggatatattcctagatacaggaagcatgtcttgagattatgtgagaggtcaaggtagctcagattcagtacatgtctcatccattctagagtgggatttgtttccgactcagaacccataaagttatgaatcttcttccacttacccacattcatgccttcactggataaaaggctagcaatgctaatgattgccaatgggacacctttgcattttcttaacatatcttctgatacatttttatactgctcaggaatactatccgaatcaaatatccttttacaaaataacttttgtgagttaaactcattaagtggctccatcttgtacaccataccatggaaatcaacgcaacactttgtagctacatcttcgattcttgttgtaactataactctgctaccatgattattttgagcaaaagcacaccgaataatgctccatgcttgagtgttccatatgtcatcaactacaataaggtacctacgaatatatttttcatagattaacatatggttgttgaggcctccctatataattcttttgaactaatagtagaaaaatagagaaattcttttgtaggatatggcaacagtagactccgcaaattaatactagaggaatttattaaaaataaattcaaaagaatcaacatcgaagcagaaaagttatttagtaaatttcacatttaggatccaatcgtagcaatatatgaaaacataatttgcaacaatttgcccaagtgtgccccatttgactaagatttggctcattgatcaaaagctcattgataccctcattaataccgccgccgcctccgtgtcccgcgcagccgctgcctccgcatcccgtggcgccgcccaccgcccgccgtgcgcgcagaacgcgtgccgccgctcgacccgcacgtgcgagagaggggacgagtgagagagaggagatagaggaggagggggagagtatggcaggtgggtcccacttcttttataaacaaaatgctgactggattgccacgcgtattccacataggacaaaaccgctctagattgagtcgaggggggtaattcgtccgttattaaaagtttagggttagcaatgtctggtttttgggtttagggtggtaattcggtcgaccacgatagtttaggggggtaattcttactttttccaatataaaattgtgccaaactttttcaactgaatgagcaagaacgttatgggcttattaatgtggctagcacaaagagggatcaagagagcaagggaacctcatgcatcgacaatgaccagcacgagggcaaggccgtgcttgtgcacaggagatgaagagagatatcaatacatgcttaactcataatgggatatggctgatccttctataggatagcccctaacaagaatctctaataaaaaaaaagccagctcgaatggaaacataaataaagaaagcaactggggtctctagtcccctaattatagcaacaagggatatctaatcctctaattatctcgtggcggcctgccttctactgcagcgctcacatgttgtcagtactgattatggaccatagcaaggaaccttgtctactgcagcgctcacatgttgtcagtactgattatggaccatagcaaggaaccttgccacaagtgtggctacgaagtgaactgtcacctaatctgggaaatgtgcctaattagctgtcaaccttagacaatatttcgatatgatccaaacaggcccaaaatcaagtcaatacagcagaaatgaagacatggttataaaatattagaaaacatgagaaacatccataggaactcaacatgaatgccacatcaaagttaaactatggatttatacatacctcttattagcaagatgtcctctgagggtgtcaatgagcttttgatggtcatcaagaattccgtagccttgaaatcctgttcctgaaagtaaatttctcagcagcttaaccatgtcagggttttgagacactgacacgaatgatgtgaaattgaatcgttttttcaattggttgtatacttgtttggcaagagttgtcttgccaatgcctccaaagccaactacagagagaactttaagttgttgtatcgaaccattctctacttcatccattagccactgagtaatttccatacatggaccgtcaatgcccacaagattttttgcatcttcatagagtgcaggtagacgcggatcaacttccaccactttgggaatgcttgaggtagatacacctagattggcatacctatcacggcgctcagccacctgcatgacacgagccttgagttcttgaatcttgtcggcaatctgatagcgagcacgcaaattcctgagcttgcgtgcagtcttcctgagcaagccatccttgttattaccatcaccaagatggtacatgaagacatcaatgcagtcctcgatgtcgtagaccatctcgcggatgtcattcctccacagcttctgctgtccatctagcttctccatatctgcaagattctccaacacagcattcatttcggtcaactcatggctaaggaactcaatgttcttacgcattcccttgagtttcttgcacttgttgctgagcagcatggcaagtttggtgaggagtggcgccatgacccccatggaagagttcactgctgccatcataaaaccaatgtgtttgctcgcctttgctcaatgggctagctggtcagagtggatgcctgaatggagaagcggtgctatcagtcaagcaatatattggtccatatagcctaccttaatttcttggaagctcgatcagttctcaattgctacctttggggcctgctattgattgacatgttggccattatatgttccatcatcaagaaatgacaaaactggataatcatagcaacaatattaaatatcccacttatgtaaagccagcaatacccaaattaagcactagaccagacgacccacctagctaaacgaacaataattttattaagacgactaaacgaagaaaattaggccgattaagacagctcaactactaacaagtatggcaaaaggaaaaaattaggccgatggaacgacgaaccaaatcatgagccgtcactgtgtcctcccgtcacctggcatacgtgctgatgacgacccaacttggtgctttgcatcctcttgatggacatcagaatcagacaagagtcacgaaatttcttggaatctcgtctacaatttcccagaattggtttgttttgtcttcagaatatgtcagtattggtagtggtacagtactacagttcactatctattgacttgttggccgcgtgatgcagatcagcagacggacggacggactacaggcccgtcacccgcacaccattcatccgaagcccggccacgacgccggcgttggggccgatccatccccgaccaccgtccgccttcggcccggagaccgacgtacggatcggaggcaccggtgcggagctcgatcccacgacagattgaggcgacggcggagcgcttaccagcagaagggagcggaagtggataacctggaggatggatggcgtcctgtcccgtctagagcttggcggccacgacgcggaggaggagatcggggaagaggagcacgtgctccgccgcgccgccggcgaaccgcccgccggcgagcgctcgaggagacgaggtggggaactggggatcgaggagtcgggtttctgcggatcagtggggaatgggtcgtatgggcccacactcggccgagcaaacgatggggctaccgagagtccgagacggcccaagcccatagggtcgcgaagcagactcctaaggctgtattagtcgaaaactctaatcagcaaacgttcgcgcgaaccttaggcggcgaacgggcagcatctcttcctatttcggtggagagcaagtataatagtaggctataaactggctaaatattaaggtggaggagaaaagagaggagagagaggagaagcgggctgtaaacttacagctaggcctaccagtggactgactttgcttggattaagtgggctggatcctcatttggatcattttggttggattgaaacggcctgggatttcattttggatcggactgcactgggcttacaaaaaatgtggtttggtttggggtggatgcgggctgagtaaaatgactgatctacggactgaatccacacgcagacgctaactcatcctcctcctcgcgccatctgctcctcgcgtcctccgctcctccacctccgccgccgccaccaccatcgccgccaatgggcgtcgctactgctgctcctcaccactccgccctcgctgcaagcggctacggctgcggccccaccggatcccgctcatccttcgctccggcgtcatctcccggcgttgctctgccagatcgcgatctcctcttcatcggcgccaagaagttgctgctgctcgccacttcgacctggttgcaagcggctacagctccactggttctcgctcgtcctccgctccggcgtcatctcctggcaccgctccgccagatcgccatttcctctccgtcagcgccaagaagctgttgctctcctccatgcaagatccgctgccgtgtgtccctgctccccacaagattcggcaatgctctctcccttcaagatccggcgagtactctctcctccatgtattgtggattgtgtgctgaatgccatgcttaaaagatttgttctaaattgcatttacaagcagctacctttcattaccatgcatgcataagaatattgatttcatgtatggagttgccatggccacaactatgaatgacctgtatgttttccaagatcagttgtgctaatttaaccatgggtacctaacaacagtctaaaattatgatctcttttcagcaaactattatatgcacaatagttggatatttatcacggcctcaactagacaactactgttgtggaacatcattagattactatgtagcatgtactgaacaaaaatctgatttattttgattttagaatacttactggagtcctaaagaaattggtagctcatggtgctaccattgctgctgctgatcatactgcaccaacctcgcctgcttgaagcggagaaccgcaacctcacggcctcagccactctgaggtctccggagtacctcaccaggccaacccgtgacttcaccttcttcgcgcctgagtacattataagcaggtgcaccccatgctgatcccctccacctctcggttcaagttgtgtttgcaagaaatattattttttattcggacacatgagggttttcttgcagtgaatccgattgttcatgtagtccatatggttgcctcataagtcacagaatgtttttgcaactaactgaaagtatgtcgaccttttattcacccacaaactttgatgtgcacccactgtgctgatactcgctcacattgttgcacactatgaattaatcaagatcatatttgtgtgctacattaattaattagctaggaacttaatcaagcatattgcttaattaaatgttgctataaaaatattctgtacatataaaatattcctttcaggacttatgacttatgcctggtaatactgatttggaaatacttcagattgatagtggattctacaagtttacaactatgggttgaattagattcgtattaatttggctgtttgtagcagttgaatgttaattttttaatcttgtcacaagcaggcttattaaacatgtctacacacaattcagaaagttcaactggatgaattatattgattttttaattatattgatttgctgcctgatagttttgagttctttaataaagaatgttaatagtactatgtgctctaaaaggtgcccatgaaataggtagagctgggattgacagtgcattctataatatacaaaaatataggttgaaataaatgcaaattatttaacaaatcattacagattgagtcttgatatgattttgagatgcaaattaattctatggtcaatggaattctagtgtgcaatttttagcttgtagcacgtgtacaatgtgtgaaaaaaataattatagaccatgttctttcaactatcttcattttagatttcttcctctatgcagacaattgaacaaactcaataataaatatgtcatgtcagagagttcaggtactaataatacaaataataatcaacttcaagaacacgtatgagggctaaagtatggtaacactttcagcaagaggttgtgatgatagatggtgtccccaagactcaatgcaaatattgtagcttaagattgacagccaccaaaaagtcaggcagaagtcaccttattaatcacatagccgaatcatgtccagctattgatggtgctgctagaatcaacttccttgcaacaattaagaaacagactggggaaggtttcgtgtttgatcccaagagaagctgggagctaatggtcaaatacttcattcacgcagaggtgccattcaataaaattgaggatccttattttttggagtgggtggagtccgtgcagccaactttcaaagttgtggggcgtcaaacacttcatgatgatgcctttaacttgtatgagcaaatgagggaagacttgcgtgctgaattacagtcttgattcgcgtgtatgtctgacatccgatatgtggacttcaattcaaatataggcgacatggttgtcacagcacactatattgatagagagtttaacatgaagaagaaaattataagctttaaggaattgaagtatccccacacaggattcgccattgaagaagctataatgagttgcttgacatatttgggcattagaaacaaattgtttactataactataactttagataataccagtaataacaattctcatgtcaagagttgataaagaatcacaaggatgcattgatgtttgagggtcagcatttgcatgttagatgttgtgcccatatcctaaatatttgggttcaggatggtatgaagataattaaaccaacaatacacaagctacgtgagttgttgaagcatttagattcttcagcatcaagaatgcaagatttcaattctatagcaaacttgaagaatcttccttcaaagttgggtttttcttttaatccaccgactagatggaattccacctataaaatgattgcagaaggattagtgtacatatctgtcctggatagctatgcaaatcaacatgatgaagttgtactattaggattagtttcctaatagtactttatgtctttctttttctattaggtgtttttatttttatctcatatatatactcttgtatgccatacaggaaggggtgatattcccaatgttattctcctacgtttgtaatcaactcctctagtgattattgccggtcgacgcccatagttttttccagcaagggttttccacgtgaaattcgtgtctccgttgtgcatctattttcataacattactaacatgctaaataataaatcaagtagtggaaattgcaacatagtaatttattcttgataaataatattgatagtgttatcgacaactaaaagaattatgaaggcaaggtaatatgaatactctcacaaacatattatgattctaaagtttcacacttgatgatgaataagggttcattttggtggagggatatcacatctcttgcaaacatcttcagggggatagccaaatgtgaaatcaggataggaactactgcccttttctggaatgatctatggaatgatgattttaaatgcactagctaccccaatctttttgctgtgaccatgtataaaactgattcagtgaaagtcatgtgttcaagacctttagaagattcttttaccctacccctctcagatgtggcctattcttaatttttacagctacaggaagttctaagcaatctgaatatacagtcaggaagggggatgcttcgaattttatctggggttcagagtacacagctaagaaattctataagctcaacttttctgcgttgcaacccccagacacatgatttggttatggaaaacaaaatgtgtctggctcctgttctgtgacagactcaacacaagagatatgctggatagacgacattgtgctaaagaagatgatgacctcacatgtgtgttgtgcaatgcggattgcagagaaacaaggttgcatcttttcttttcctgtccgttcagtatcaggtgttggcagcacctgggaattgactggaatcataatttggagtttttccaaatgattgccctagcaagaatcaagtttgcttagaggggattcttggagattttctttttgacagcttggcacatatggaagcaaagaaattgtttaatctttcaaaacgttcaaccttctttccaagtctggagatcattttttgtgaaagaagttcttctgcatatgtgcagaatgaaggatccctcaaagcaatttgtttttaattggttacaaaccttatagtcttccttgcggtttccttttgtaactctgtaatcttgtaaatattttcaatctttataaaattacactgctgggcaaagccctggcagtaattccagtcaaaaaaaggtaatatgaataccttaaataggagaccacaaatatgcaatgtctcttgtaaaaaatgtccttttcacgaattttttaagcaaaatcattaagaatagcttggagatcaatggtatctaatatattcttttcaatgctgcacatagccaagccattcagtatatcacaagacatagtttatctcaaataattttttaataattttaatttaaaaaaaattatttcagttaacgatacacataaataaaaattgctaagtaaattaagtagtaagaagggaaaaaatcataacctaacctatctattatctattatatactaaaagtccattaatctttctacaaatgctcctaggccgccacgtgctattcctacaaatactcataaaccgtcacgtggcactttaacaaatagggtggacccactgttttgaaatatgtgacactttaacaaattgagtggacccactgtttttgaaatattatatttgtttttttaaaatcccccaaagccgaaaaggctaacgggcgatcgatcgcccctagcgatcaccccctccacgtggtttccttatttggcaccgcattattttcctatttttataaatttatgcagctcaagtttatatacctcaagtttacacatctaaattttatacacctaaagtttagagacccaaagtttataagtcaaaagtttatatatccgattcaaatttgaatttgaattcatatatgttttatgtataatatttctatacatctaaattttatacacctaaagtttagagaaccaaagtttataagtcaaaagtttatatactcgattcaaatttgaatttgaattcaaatatttttatatatagtatttctatacatctaaagtttatacaactaaagtttagaggcccaaagtttataagtcaaaagtttacatacccattttaaatttgaatttgaattcaaatattttttatatatagtatttccgtatataaaatttgctaaccttgcttttttattttttaaaaattttatggtgcagtaggacgaaaagaagggtaggagaaaggaggagaggagtgtataggggggatggggggtgatcgaccacagcgatcacacgcccattagccacgcccccctccaaagtccaactctctttccacctgccaagctggacgtatgtccttaagaagggcctacgcgtcgggcgcccgatggtttggggaaaaattaggcgctgacgtcagcgccacgcatgcgtgaaaaaccaatttaaactgatttttctcttaaattatttatcaaaatcatgatcctattgcaccattaaatttgttacaattaaatctttaaaacaagaccacacatggatatattccgacgggaaaaatttttagcttattattgagttttttaaaatgttgcacgatgttccaccaagtatatcggaattgtttcactaagtagatcgaaaatgtttcaattgtttaaatcaggtgttgtttcaccttatataaaaacaatgtttctgcaagtagtgaaagaatatttcagttcagtgcaatattagatctatacatagtgaaacattataagtacactagttgaaacatttttccgtggaacaaaaaatgaaacgaattcccttaatagagggtttccaaaatatacgggtgattttgttgcaaaagaatatttcgttcactgcaacattagatctatacatagtgaaacattatgagtacaataggtgaaacatttttggtggaacaaaaaatgaaacgaattctcttaatagagggttttcaaaatatatgtgggtgatttgttgcaaaagaatactttaattcactgcaacattatatctatacatagtgaaacattgtgagtacactaggtaaaacattttttgtggaacaaaaaatgaaacgaattcccttaatagagggtttctaaaatatataggtgatttgttgcaacggagtatatggtggggacacgtagcagatagataggaacacatccgggggcacagggcgcacccgcgcttcgtgggggagggggagcgaccgaggcgtagcattttcgatgtacttacattgtaggtatgcaatcctccctctctccttcctattttgtaactaacaatttttatttagggtcgttaataattttaatataaaaaacattttaaagacaaaataatatatattattattgatctattaatctcaagccgacaggtttgccactactgattggtccacgtggagctatcaaattgtcagataaatctttggaattttggacggtaattttcttgcagcgtgggaaacgggtactcttgccgtctcgcgaattctggatacatctatgagtgctacgggtgcatgcacgggctagcatcttaaagcccaatcatggactcatgcatgcttaggccttgccggctgctaatcacagtatcacacgcccaggagcaggcaaacgaagaagaaaaaaaataaaataaagaagcacaaatagttttgtgaaattattaggggtatgatatcacgtatatattgaagctgtaaattgaagaatgctcttgaaaacagaaatttgaaaaattaaatgacagaaaaagtcagggagcggtcgagtatagaaaaagcgctagccatggccgccaggcgccagtagggcgcctagttcgcgtgtctgcgccaatagaatagttagcacacacttttcccattttgtcatatattaatcttagtccgactcccagcgctcaggcccacctatgcgcaccatgtccgtaccgctaattacataattagcaaaaaataccatcattagcattatttttcagaaaacacatacacataatttagttaaaattttgaaaaatagttgaaagttttaaatatgtaatggacggatttcgaaatttgaacaaaaattttaaaatttgagttgaaatatttgaattttgatttatgaaagttttcaatttgagatgaaaattttgaattttgagttgtaagtttaaatttcgatataaaagtttttagttttgaggtgaaaattttgaactgtgggttgaatgcttttcaaatttgagatgaaagtgtttaattccaattgaaagctttcagtatttgagttgaacgtttttaaagtcgagctgaaagttgtcaaaacttgacttaaaagttttcaaaattcaagttgaaagttttcagaattttagtaaaaaataaaaaaaatgttatctgaaacatttatcttgattgacctgattataggaactaattacgtataaaagttaggctaatctcgttttttctgagtcttgctcaaattcgcagattcgctgcgtaaaaggaaaggaaaacgcgtctattgtataggccgaaaaacgcccgccacttaattacctcctgacgtgtctgtgctaattactccctccgtctcattataagtgaagcaagtttccatgcccaacgtgtaaccgtccatattatttaaaaaaattatgaaaaaaattgaaaagttaagtcactcataaagtactatttatattttatcatctaataacaataaaaatattttaaataagacggataattaaagttagacaattaaacctacaacaacgcttattatgggcggagggagtaggattcttgtcgtttcttctgctcgtctttttccatgtggctggataggaacatgatggtgagctcgacttattcaaatcaagaaccacgaatctacctaatgcgtgattaatgacgagagggacaggagtggacgacgctggtcggctggtggcaactttcctttttctttggaacgctgaaggcactaatgaataatgatctcgaggtgaaacaaaggaagcttcctggtccagtgagaacacagggtcctgaacaaagggaacaaaggagcggatgcatgcgttaagagcatgaacaataccagactattaggccattcccaacccaacaagctgccacctaggataaaaaataatataacaagtgaataaataagaaaagatgcatgagacatggtttctacacaacattcaaaatatcatgtgagataagtagcactaaattttagtatagaatagtggtgcttgcattggaagagtagtgtctagtactaatttcctaatgatgtggagtttatagaaactgtctagtgtcttgggttgggaatggcctaagtcagctacaagcatatgtgaaggagataaagagaggagagagaaaaaaaataggctatagtatgaacttcaagacataatatgcgtatgacatatgggattacttattaatgatgtagtatatatttatagttaaatattgcatgaattaactattggactaactatagattaattagagctaacagttgactataccattaaacttgctctaattggactggaactagaatatatatatacacttactagaaaaagggtgatatgaaaaaaagtccaatcatattcaaatactaaaaaaaataccctcatacctttgtgtttgtaggagtggggttttcctacttaaatactctctccgtttaaaaatgcaaggcctataatttttctacagtctttaatgtaaaaccatttaaaattgtaatgcctatatatttttttctacattcttcagcttaaaactttaaggggactattaaaaatctacgacaagtttttttggaacctttaaaatttactataatatagtatagttataatataattttaccataactataatataacttatataaagtattaaaaaatatatgcaactttttatactaaattatatagatgttatagtgagttataatttgtttaactatttgtaatatcacgttgtaactatactataatttaacttatatgtaatatagtacaaaccttcccgtagcatcatagggttgaaaatttaaaagctagggaagaaaacacaattccacaagttctctatgaaatccaaactttaattattagcgaaacattacaaatgttggttctttaagctatatccctttctttacttcatgcattgtggcacacgagaagtaatgggatggcttagctacctcttttttttttttcatacagactttgtgtactaggtgactccccatgcttggctaggtaattacaaagcaattctcaatatatttttttcgataatcaagctatgagtaaaaaggaaaaaaaataaaacatcggagtttatcatgaaaatacaaatgatatccacgctttaatgtaaaacatattgataagtatatatattaaatattataaagatgatagatagatttggtaaaatattatgcgaatgatgtgagaggtgacgttgtatatgcttgcatgttgatttgtagaatctatacctctatatatctatactaattgagcactttctactagctcccacgttaaccagaaaaatataaccgttagataaataagtggtttaatcaggaccgtagattgtatgttatgcttttacattgtgtagtggtcgtgggctctttcaaaaagcacatctaatctaatctccagccaaagcgtccgggagaggcagaactaatctccaagcgcacgtacgtatcacgagaagaagagatgggaacgcaaggagaggaattcgctggaggcagccacgagcagtacttcttcgccaatgacgggtgtcgctcgagccatcaatttaagctccattgactcagaccctgaccaaaattgatttttatctgaaccaacatcaatcaggactccttcaggtaaggcggtacgtatacggtacacacaaattccatgcagggcgatgcatgaaagtagcaattctgatgttaatgactgcaggcgcaggttgcagattgatctccgcagaggagccgctgtatgctgggggcggttgaatgcaaaggaattacgatgagaagtttttttcaatccgcttacatatatgctgataaaacgttaatagcaatggtatcaccaggaacagcgcaaggttgtaaatcaactacagggcaaggagtacaaggtgatataaataacctggcaaaataggcaaaaaatacctgatggtactgtattccaaaatcaacgaaaaaaaggtgcatgtattgacgtttgctcctgttcgacctccactagctcctttacacaataaatttcatcaatattataaatccgcgattcattatttttgcacttcactattttgtagatttaattaatatatgcaacgcatgcttttgttaaagaaatattttgttcgcaaaaaaaaataaagaaatattttcttattccacagtgtcaaaacaattatgaaatttaatctactgttttctagaataatatttgaaaattagaattaacacttatactgattcggctctcgaagaaaactcccatgttaactagaaatataaccgttgattgggtaaatcatatgatcgtaatgtattgtgaatagtattgaaaattcatattaaataagaaataacattgcgaatactatggacaccttattatcttttaagttttaataattccataatgcagattaataaatattgagtgtatccatcatagattttatgtttcatattttattaaaataatatttttaatttcgaaattagtaattaccaagtattattttattctaagaaattattttctaaaatataactaacacattcatcacatgattaaaattttattatttataatatgaatattaatagagtatgcaacgcatgggttgggagaaaatggacattatgccactctcaagagtgggtttcgctgtaatgccactccgcaaagttgcttcgctaaaatgccatcgccaaggagtgccaacccgctgcttcgctgattctccatcttcgccggattaacgcacaaaatcggctgtgttgtgaccaatgtgcccctggctcagaaattaggttactgaggcaagagaaggggatcgagatgcagtcactcctcccctctcatcgttggctctagctcatggtggcgccctagatcgatctcgtcgccatcgccattccacccgctgccgcctccgccgccgccgtagtccccctccccccttgccttcaccccttcttgttgacgccgagggcagcctccggatgccgtcgtcaccgacatgaggtagaaacacggtggaatcgatggattgtacctggcatgagctagtcgtggggtaagaatttgcttgcctccatgctttcatttgtcagcttgatttttcatttactttgattgccgactgctgcgaatccgttagatattgctgtaacaatcgctactattttttttcttcaggctcaaggaggagcctgcccttagtttagctgtggtcgaactcgaaattgaccatgctattaaatctgtttatattgttgcgccggatgggatagtggagccagttccagttcaagttccagctggtggttttgccccagctagttccgatatcgattgggatagcctagagattcttgctcgaaatgatgatgaagggagactatatcgttggggaagataaattctacgagctattgggtttgagggctgaagatgaggttgcagatgaggctagacaagctgctgctcgaggtggaggtcctgatgttgctggtgctgctgcaggtggtgttggcggtgctgcagcagctgctgctgctcctggtgcttctcctgttgctgatgaggatgatataactggggcagcaattcctgtcgatgatcaagtaccaggggagagggtcatggcctatgaccccaataattcttgcatgaaggctggcacagtgtaccctaacatgaaggaatttagattggcaatgagacagtttgctataaatgctgagtttgagttgaagttggtgaaaactgaccctgaaagatacataggtggttgcaaagttgaaggttgcccttggcatatagtggggcataaacaacctaaccagaagacagtgatggcatttaatttcagtgatttttgtttgattttggcataatggttgcagaattgatggattcttgcatttaatttgtaggtgactgtgttacaagacttgcatacatgcacttctagcagcagaagaaagactaccacaccaacagctaaatgggtggcaagtaacgcaattcctattcttaaaaagaatccaggtatgggccctaaagccttgtagacccaactaatggaagatcacgagtgcacaattaactatgacactatatgtagaggtagagaaaaggctatggttgagctatatgggacatgggaagaaagttttcacatgctttatagatggagggcagaggttctaagaacttcactagggagtgtgatagagatagacactgtagaggttggtgggaaagtattttttcataggtttttctatgctttgaggccctgcatagacggtttcctataggaatgtaggccatatattagtatagattccgttgctttgaatggaagatggaatggtcatttggctgctgccacttctgttgatgggcatcactggatgtatcctttagcttttgggtccattaatgctgaaacttaggataattgggagtggttcatgagacaacttcataaggctataggagatgtgaatccattagctatttgtactgatgcatgtaaaggcttagaaaaggttgtacatactgtgtttgagcatgctgagcagagggaatgcttctggcatttgatgaagaactttgtgaagagatttggtggtgatgtgcactcacacatatacccagcagcaagggcatacaggaaagagatttggcaaagtcacacaaaagaagttattgaagcttgtagtgatgttcttccttggcttgaagcctatcatccattgaagtggatgaggagtggtttcaatccagcaataaagtgtgactatattactaacaatctggcggagagtttcaacaattggatcaaggattataagacattgccaatatgtgaccttgcagacaagacagagtgttggttatggtattgtggaacaagaggagaagaattgcagagaagatgactgggaacatcttgcctgctgtaacacagaagcttaaggcaagaactaggggtttgggtcacctctcagtagtgaaatctgatagcttctgtgcagagattgttgacaacagcaccacccatgagaaacatgttgtgaaggcttacaatcagtactgctcatgtgaggagtggcagcacactggaaagccctgtcagcatgcattggctttgataacctctcaacaaaatagggatgtcaacattgaggactttgtgaatccctatttttcagttgagctgttcaggaaggcttataggagaattatagagccattgggtgacaagtcttactggccacaggttgaattgccatgggtgttgggtgcacctttgccaaagaagacaaatggaagatacataaagcttaggatcaaaagttgcctggagggtggtggcaagtctaaagccaaaactactccaactgataatgactcagggaagagggtgctggtaaggggcaagagaagatgcaagggatgtggggaatttggtcatgttcaaacaagctacaagtgttcccttaatggaatcaaaaaaaggctagtgtactaataccaattttttttgtctggagtacagtttcataactgtaatgcattattttgtattgtaatttgctggaagaggaagccaaggaggaacactacaaaatatgggaacacttctgacattcctagtcccaaaagaccaacagtgcagacaatacttgaagaaagtctaggaagaattacaagaaggtaatcatctaaaatacattcacattactttagattttgtcctatttcggtctattcactcatttgttcaaataccatggcttacagccggctagcatcattgatgaagggaggagctcagaacattccagcttctaattcacagccagctgacattccatcttcaagctctcagcctgctgacattagggcttcaagctctcaacctactgctgacattggggcttcaagctctcagcctgctgcttcaagctctcaggctacaagcaatgcagcaccaagctggcaacccagaatgtctcctagaaagaagctcacaccaaagaagaaacttaaaacctgaacttagttttagtctggtcgaattagcctaaaaacttcatctattaggccattttgctccatgaggagtccaatgtaatatatttgaacctaagtgctatgtgtgaacctaaattgtgatgtggacaaatgcttatgccatgttttgtatgaaactatggatgcttgattatgtggtgcactgctgcaccgctattgtctgaaattatggatgccttcactattgtctgaaattatgtatgcgtttactgaatttatgtgccattgtctgaaaatatggatgcttatgctgaaattatggatgctattgtctggaattatgtgttgcaggactatttcctacaaaacaacttcttgcacttgtgctgaactgatgtttcatggagatctgtcacctgtgcataaaacatgccaaaattactcatctcaaatggaaatgcccaaatttttgtaattgcacaacaatcgaaaataacataataccattcctgatatttcagcaagcaagcaggacaatcaaaagatgccattcattagtctaaatagatacattgcaatgcttacattccttgtactaattctagggaagccagttcacttgaaaatcatcacaagcacgccaataaaacaaagaactagcaggcctatgttgatcatcactaaaacttgaatccaatttatcaacttatccatctttccatcatcaaccgacctcagcttcatctctacaggagcagcaaccatatgctccaatgcaacatcactgggagcttcatcaactgcatgtagactcaatccttcaaccatcttcttgtaacattcgatccacttgaaaaacttgcaagaatttggcacctagtaacaaatgcacattagtaacaaagaccaaaagacaccaaatgcaacaaatggaatactcacatcttgttcgttttcctcacatttgaagaaaacctttccaccatgcctcatcgatctgcactcgactcctgcagcgccacacctagggcaacgaacgagagggaggccggccgctaaatcctacaggcagccgagcatgatatgagctaccttgcgacattcccaaatcatcgcttccggcggcaagtcttcgctgcatgatgacgacggcttccggcggctgctctcggtgtcggccaagcgccccttgtttcaaagagaggaggacgggttattcacatttaatttgatggtcagaggcgaattgaaagctaagctgtggtaattaagacccccgggggaaaatagggatgtctcctacgttacccataatatgtagaagtatcgacgtaatttcatagagtcattcgatatgaatgctacatgaagaacataagccagatgatggaacgcggagacctaggatgtagaagatcataacatgagcgattcggcagatttggattcctttcctatatatccacttatgtggtacttcatcatacgattcatataagatctatctgtctagagatcatcatatacatctagaaagccgtatgctttggaagaagcttgtacagtttgggaaggggttttttgagagaaaagaagaatctacttcaaccgatatgcccttaggcacggccatacataacatagaaatcacacgtggaaggggtgggcaattagctagagcagcaggtgctgtagcgaaactgattgcaaaagaaggtaaatcggccactttaagattaccatctggggaggtccgtttggtatcccaaaattgcttggcaacagtcggagggagggaggaggagggcatcggcaacgcggatttaccgccgccgccgcagaatggtcaccgccaccgccgcctgcagccctctcaatccccttctcttgtctcagtgacctaatttctgagccaggggcacattggtcacaacacagccgattttgtgcgttaatccggcgaagatggagaatcagcgaagcagcgggttggcactccttggcgatggcattttagcgaagcaactttgtggagtggcattacagcgaaacccactcttgagagtggcataatgtccattttctcatgggttggcatactaattggtatggaggccttattcaaataaatctaaattcactaactccttgcctttgttttatattatcaccatgcatgtgtaaattgtgctactattttatttcggggtttttacagctgaaagtaacttcgataaatactatggaacatattatcttttttcaggtatgctatcgagacttcttagttaatttgtttatgctttgcacaagtcaaacatagatttatcacacaagatttcaggtaagttcaactattagataatataacagttgcttcaacaaaaaacattttactgaatctatatataatttttaagggtgatctatatctacagtgtttgagaaatagattatatttattataacgtgctttatatttcttattcattcctccccttttataaccgtgatattctttttgatgatattgatactatatttacatacatccatgagtaaagatcatgtaatacaaaggataataatgctgacgatgctcattgaccgagatatttcacactttcagtttaagatttccatatttctaatataggtgaaaaataatatgttataaattaaatagcccgtgtgaatgcacaggaccggcacaaaatacagctgtatgcttattaattccaattttggaattacatcatggcgagttgtaaaaagttgaaaaaaatgaaattatgaaaaaaaatatatatttgagactgtaaactaagatggatatctatataattttgaatgaaataagagaaacttattatggattctgttataataattgagacagcatgcagtacaccagttcattgagtttttttgaattgaattcatgaaaataattaccaatttggatatctatgattgagcctgcaaactaaggtaccttggtatattagctctaaaattatgattctcataaattttgaattacaaattatgaaattatatcatatttattttcctgtgctaactatgcactttgaggtagtatgcatgttaatcaaattgctccaaccatgctttaataataacccgtgcaacgcacgggttgacgactagtctatctatctattatatactaaaagtccattaatcttcctacaaacgctcttaagccaccagttggcgctctaataaattagagaaatcaaagaaattctgagaaaaaagaaaagcatctatccgttgattttaaaatagtgggtccactattagaaaccgtcagattaactatattgatcttaaaacgtacaattccacaccatccgtaggtacgtacgtacgtacggttccatctccctccctcctttttcttttcatatatatataatcgagataacagttaatatagttaaattttatataatcataacttatatgattatattatgatatatctcttccaaaataaagtttacaccactatatttttacccattaaataaaggtatacgtgaaccctttatgtggagcattattttcaaataatacactatttaaataaagtttataaagtttatatcgttacattctgtacgcattaaactaacaaagaaatatattaactaatttatacttaaacgtgctattttagactttttaataaaggccggattaattttacgagtctttacaattatttgtaccataaattatatatctatttttatttttcaaataaatatataattttaatatctatattagatttattgcgttctagacctacatccatcttgagtgctccactaaataaaagaaaatattaaaatttgtcattgaaaatcaaaatatgctagcttattttttaatgaaactgttaaacccattaaaagtacattattagacatctaatgactttctaccaacttaattaatttcttcataaaaaaactttattaattcctcacaacatacacctgggggctatttacatatacgaattgatcttgatgcttttgtaaataaatgatattttaaatttaaaagataaataaacgatcttaaaatgatcatagcatctaaatcatacatatgattgctcctagcactcctaaacacttctaagtcgctatgtggcattctattaattacaaaaacactcatataatcgaccatcggtttccacttaaaccgatggacccaatttttataccatcatatctatcttttcggaaaaaacaaattctatcagaatctctgtctggctcactgcataacatgcatgtgtgcgctcctataccttttaaaccggtagaaccattgtttctaacaagtgtttattcatggtacatgacattttaaaaatattactgtgcaatgatatttcgacgttattgtattcctgctaggttgcgtggagcctctcattcactctacatgaaatgttcataggtagatcgcctctcaaaatatatcaatcatattaggctatataaacccgtgcattttttgtgtagattaatgtcccacccaattcatcctttaacatattatgataatatattatacaattaaaaaaataaaaacaccttaatttttattttacacttacttttactttcgttgacatgttttctaaagaaaataaatctaccttttttttaaaatgatgaagaatattataaataattacttatagatactacttatatttgatataatataaatctaataggttagaatattattaaagaattaattaatgctgacaaaaataatgtatggagaaattgtggcagatgttctcctgttaaatgtcgcttttataaatacctcaaacttggcgtacgacgcatgcccgcgtgaatgcgcgggctaccttcctagttaaataaattggacgtgatatatgatgttgtatgcttgcatgaggttaaataaataattattgctaatgggtgatgatgtggcatggttatatggctataattataactttatgaaaatataggttagattgtggcatgattgctgattgccatggttgacctatatatagttgcacgaccagtggagccccctattatagagagacacgtccaaacaaagacctcgacctctttccttcaacgaagcttcaacgacgcgcgcgttctcacaccttcttccacgctgaaacggtgtggaactgtggatcattaatttacgcgctaaatcaccggttaggcctcgtttagatctaaaaattttggtaaaaaatgtcacattaaatgtttagatatatgtatagtgtattaaatgtgggggaaaaaataattgcacagtttacacgtaaattacgagataaatcttttgagtctaattacaccatgatttaacagtgaacatttgctaatgacggattaattagttttaataaatttatcacacagtttacatgcgaaatctataatttgttttgttattagtctacgtttaataattcaaatacgtgtccgtatacttcgagacctttacacccaaggaacacccttatataagctggggccagagaagcgacgatggagggagagacatacacatccacaatcggcagctattaattacacagagagctcctagcttgccagcttgattaagcaaaggagtgacgtcgtactgcactgcgcagccatggcgactctggagacgtgggtagggttcgggtcggccatggccggcgtgggcttgctttggtcccggatgccggagcacgtccacgaggaggctaggtacatcatcagtagcgtggtccccatggttatgtcctacttcaacccctacgagcagatcaccgtgtccgagtacggcgaggagcggttccggcggaacaagatgttcgacgccgtctccacctacctgaggagcgcgtgcctgggcagcgcaaccaagctcaaggccaagctcggcaacaacatcggggatgacccgcttgtgattctagacgagaaccaggaggtcgtcgactgcttggatggtgctcgcatgtggtggaggctgtaccccaaggcctccaagaacacagggagcaccatcatcagcatgttccccggggacacggacgagccgcggtgctacaggctggtgttccacaagcgccaccgccagctcgtgctcaagacctacctgcccggcatcatccggcggtggcgcgagctaaccgccaaggaccggcagaggctgctgttcaccaaccactccaaacaaggggagatcagcatgtggaccagtgtcccgtacaatcccccgtcgacgttcgacatgctcgccatggaccatgccaagaaggttgagattatggacgatctcagggcgttccagaaggggaaggaataccactccaaggtcggcaaggcgtggaagcggggctaccttctgtatgggccaccgggcactggcaagaccactatgattggggctatggccaatttcctcgactacgacgtctacgacctcgacctaacatctgtcaaggataacgccgagctgcggaagctcttcctcgatacgacggacaaatccatcatcgttatcgaggacatcgacgccatcgaggtcgagctcactaccaagcgcaagggcaagaagatggacaacagcgacgaagtcgacaacaaccatgtgctggtcgagctttccaacaagactgatgataaaagcaaagtgacgctgtcaggcctactcagcttcgtcgatgggctgtggtcggcgtgcggcagcgagagggtgttcgtgttcacaacgaaccacgttgacaggctcgacccggcgctgattcggccggggaggatggacaagcacatcgagatgtcctactgccgcctcgatgcctttaaggtgctggccaagagctacctggacatcaccgagcactcgctttttggtgaaatcgggagactgctcgacgagaccgacacgactccggcagatgttgccgataacctcatgccgcggggtaagaggaacggtgaaatcagtcgactgatcgatgagatcgacgcaccggcagacgtggccggtaatcacatgctacggtgcaagaggaagagagacgcggacgagtgcctggcaggtttagtggaaacactgaagaaggccaagatggaatcagcaacacctcctatggacacaatcgaggaagaggccaacaaagaggaacaaacctaacacagaagaaagctagacaggggctgatacatgatgagggctgctacttcttggcctcctcggtttgcgtgtcctattttacctgacttccgtgtaatggtgcgtacgggtttattagtcacttaagctagcataagccataccataaaatggcaaaatatataaaaatagtggtgtattacgacttatgttctggatctattatttcacgctccataattcgtctggtcaaccttgtaaattctgataattatatgtttatatatatgtgtggagattatggatatcccatatctacacggcgacggtatttgggctgaatacaggataccgaatatagatagaatatcttatttgtatctcgggtttgtttcttaacttgtacatcaaggaaacaccttgagacttagtcggttacggctgtattttatctgtatctacatattccgttagggatatagattatcttttgtaacacggactccttcccatatataaggggggtccgggtgcctctaggggcggatgttgattttctccaaatcatacaatcaataatacactcggcggattcatccccggacaggagtagggtattacttcttgaataagaaggcctgaacctgtataaatcctttgtctccaaacccatacacttttctagcttgatagccacccccttttattattgccgaaatctagtttcgacagttggcgcgccaggtaggggtagcgtcaagcttttcgccgatcagtgcaatgggttccgtctccggcatcgacgacctcgtcttcccacccgggcagacgtttcggttcggcagcctcgacttcgtcaccaacaacttcggcaagatctctctccttgactcggggtcaaaccagtcgggagagaaccggatttcagtcccgtttggactcccaaacgcggctaaaagttaccccaagaccatctcaatcgagtcggcttcaaaccactcgggcgagatcgcatcttctccaacgacaccagatcaagatgatggggcttacccaccggtcttgatgaagctccccgatgatttggcggccatctccatcacgacagcgtctccatcccgtaggcctaggcggaagtcggcttcaacaccgatctcgcctagcttcagggaagtcggcgtcatcctccaaccactcggcacggtttcgacggatcagctggatggctactacagctctcccaccgtcgactcgcgccccaccgacatcgtggaatacgacgagttcagctctctctacaacgacccggatctcgacgacttcgacgaaagcctagatgacaactacacccctctcttcttcggcgtcttcatggccaataacgagacggaggagcaacgccaagcccgggagaccgaagcacgtcgcgagactgagcgtcgccgactggaggaggagcatcaagcacaagaacaagaacggcaacggcgtgagcagcaggagcgtgagcggaccgcgaaggaggctgaggatcgacggcagcgagctttggaagcagggcgccgagcgcgtgatctcatcggccaacaagatgttgaaggaacgccggttttccgcacccctcaacagaatgcggttgccgcgatcaccctcctcgacaccctcctcaaagaaaacgagctcaatcaatctgatcacgtcgtcaacatcttgaaccagacgaagaccatgatcgcggcttcagtcccagtcaactccgaaagcgtctacacgccgactggcagccgagttccccacttccgatctcatgactaccgtcatccaagcctcagcatcaccggcgcaggatccaatcgcaggagcaggggtcacgacgagcggtccattcactcgcctcccgatcatcatagggagcgccgagtggaacggcctcgctcaccacctcgtcgccgccccgtcgatcttcgcgacacaatcatacaacgccgagcagctcgaggccatcatcattcgccggaccgccacgacgacgaccttgacggagtagcagccttcaccgatgacctgcgtcgagtggattggccagccggcttcaagccgactggaatagagaagtacgacggtaccactaaccccgaatcgtggcttaccgtctacggtctcgcaatccgcgcagcaggaggagacaacaaggccatggcgaactatttaccagtggctttagcagattccgcccgatcttggctccatggattgccccatggtacaattggatcttgggctgaattacgcgaccacttcatcgccaacttccaaggcaccttcgagcgtcccggcacacaatacgacctctacaacgttattcagaagtccggagaatcccttcgagattacatccggcgattttctgaacaacgtaacaagatctccgacatcaccgacgacgttatcatcgccgcatttaccaaagggattcgccacgaagaattggtcggcaagttcgggcgcaagcctcccaggacagtcaagctcatgtttgaaaaggccaacgagtacgccaaagctgaagacgccgtcaccgcatcaaagcagtcgggtcccagttggaagccaaacaagggtacgccggctacgggaggaggtggaagtaacaaccataaggaccgcaagcgtaagcctgaggaacttgttgcaaccgccactcactcttctcgacagcgttcgcgcgtcaacacgttcgacaagatcatgaactcccaatgcccgcaccatcctaactccaaccacgtggccaaagattgtttcgtctacaagcagtttgcggagcaatacaccaagactacacggaaaaactccgacgaagaacaaagcacgtcgaggaagaaggacgacggcgacaccccggcaggatttcaagaccaccgcaaggaactcaaccatatcttcggcggccccctggcttatgagtctaaaaggaagcaaaagttgaccgaacgggagatcaatgctgttcagcccgacacgccccaatatcttcgatggtcagagattgcaatcaagtttgaccgctcggatcatcctgaccgagtggtccacccggggcggtaccccctggtactagacccagtggtccgcaatgtcaagcttcgcagaaccctcatcgacggtggcagtgcactcaatatcctcttcgccaagaccttggatgatatgcagattcctcgctccgagctaaaaccaagcaatgcgccttttcacggcgtaattccaggattatccgcaactccactcggccagatcactctcccggtcacctttggcacccgggaaaacttccgcacagagaatatcagctttgaagtcgccgatttcgagacagcataccatgccatactcggacgcccggcgttagccaagtttatggccgttccgcactacacttacatgatgatgaagatgcctggtccccgaggagtcctatccctacggagcgacatcaaacaagccgtcacatgcgacaaggagagttgcgacatggcccaaacccgcgagatggcgtctgcccgagaggatatccgactggctgcagccgcgacgagcgaaggagaagtgcccgctaccaagacttcaaaaagtggagaaagcgaagccaagactaaaaagattcccctagatccctctgattctactaaaactgctgtaataggcgccgagttagattgtaaataggaaagcgcgctcatcacctttcttcagaacaataaagatatctttgcgtggaaaccatctgatatgcccggtattcctagagaggtgattgagcactccttacatgtcaaagaagatgccaagcctatcaaacaacgactccgccgattcgcacaagacagaaaggacgcgatcaaggaggaattaaccaagctgttagcggcaggcttcattaaagaggtccttcatcccgactggctggcaaacccggttctagtatggaagaaaacggggcaatggcgtatgtgtgttgattatactgacctcaacaaatcttgccctaaagatccttttgggttgcctcgcattgaccaggtagtcgactcgaccgccggctgtgagcttctcagttttttggactgctactcggggtatcatcagatccgactgaaggaatccgactgcttgaagacttcattcatcacaccctttggagcatattgctacgtcaccatgccgttcggactaaaaaatgcaggagcaacttatcaacgtatgatccagagatgcttctcaacacagattggccgcaacgttgaagcctatgtggatgatgttgtcgtcaagaccaagcaaaaggatgatttgatcttggatctagaagaaaccttcgcgagcatccgcgctttcaggatgaaattaaaccctgaaaagtgcaccttcggagtaccgtcagggaagctgcttggttttatggtgtctcataggggcatccaagccaacccggagaaagttactgctatcctcaacatgaaaccgccaagtacccagaaagatgttcagaagctgactggatgcatggcggcgctcagccgatttgtttcaagacttggcgagcgggggatgcccttctttaagctactaaagaaaacagacgacttctagtggggacccgaagcacagaaggccatgtttctgcaagtagtgaaagaatatttcagttcagtgcaatattagatctatacatagtgaaacattataagtacactagttgaaacatttttccgtggaacaaaaaatgaaacgaattcccttaatagagggtttccaaaatatacgggtgattttgttgcaaaagaatatttcgttcactgcaacattagatctatacatagtgaaacattatgagtacaataggtgaaacatttttggtggaacaaaaaatgaaacgaattctcttaatagagggttttcaaaatatatgtgggtgatttgttgcaaaagaatactttaattcactgcaacattatatctatacatagtgaaacattgtgagtacactaggtaaaacattttttgtggaacaaaaaatgaaacgaattcccttaatagagggtttctaaaatatataggtgatttgttgcaacggagtatatggtggggacacgtagcagatagataggaacacatcgtggggccagggcgcacccgcgcttcgtgggggagggggagcgaccgaggcgtagcattttcgatgtacttacattgtaggtatgcaatcctccctctctccttcctattttgtaactaacaatttttatttagggtcgttaataattttaatataaaaaacattttaaagacaaaataatatatattattattgatctattaatctcaagccgacaggtttgccactactgattggtccacgtggagctatcaaattgtcagataaatctttggaattttggacggtaattttcttgcagcgtgggaaacgggtactcttgccgtctcgcgaattctggatacatctatgagtgctacgggtgcatgcacgggctagcatcttaaagcccaatcatggactcatgcatgcttaggccttgccggctgctaatcacagtatcacacgcccaggagcaggcaaacgaagaagaaaaaaaataaaataaagaagcacaaatagttttgtgaaattattaggggtatgatatcacgtatatattgaagctgtaaattgaagaatgctcttgaaaacagaaatttgaaaaattaaatgacagaaaaagtcagggagcggtcgagtatagaaaaagcgctagccatggccgccaggcgccagtagggcgcctagttcgcgtgtctgcgccaatagaatagttagcacacacttttcccattttgtcatatattaatcttagtccgactcccagcgctcaggcccacctatgcgcaccatgtccgtaccgctaattacataattagcaaaaaataccatcattagcattatttttcagaaaacacatacacataatttagttaaaattttgaaaaatagttgaaagttttaaatatgtaatggacggatttcgaaatttgaacaaaaattttaaaatttgagttgaaatatttgaattttgatttatgaaagttttcaatttgagatgaaaattttgaattttgagttgtaagtttaaatttcgatataaaagtttttagttttgaggtgaaaattttgaactgtgggttgaatgcttttcaaatttgagatgaaagtgtttaattccaattgaaagctttcagtatttgagttgaacgtttttaaagtcgagctgaaagttgtcaaaacttgacttaaaagttttcaaaattcaagttgaaagttttcagaattttagtaaaaaataaaaaaaatgttatctgaaacatttatcttgattgacctgattataggaactaattacgtataaaagttaggctaatctcgttttttctgagtcttgctcaaattcgcagattcgctgcgtaaaaggaaaggaaaacgcgtctattgtataggccgaaaaacgcccgccacttaattacctcctgacgtgtctgtgctaattactccctccgtctcattataagtgaagcaagtttccatgcccaacgtgtaaccgtccatattatttaaaaaaattatgaaaaaaattgaaaagttaagtcactcataaagtactatttatattttatcatctaataacaataaaaatattttaaataagacggataattaaagttagacaattaaacctacaacaacgcttattatgggcggagggagtaggattcttgtcgtttcttctgctcgtctttttccatgtggctggataggaacatgatggtgagctcgacttattcaaatcaagaaccacgaatctacctaatgcgtgattaatgacgagagggacaggagtggacgacgctggtcggctggtggcaactttcctttttctttggaacgctgaaggcactaatgaataatgatctcgaggtgaaacaaaggaagcttcctggtccagtgagaacacagggtcctgaacaaagggaacaaaggagcggatgcatgcgttaagagcatgaacaataccagactattaggccattcccaacccaacaagctgccacctaggataaaaaataatataacaagtgaataaataagaaaagatgcatgagacatggtttctacacaacattcaaaatatcatgtgagataagtagcactaaattttagtatagaatagtggtgcttgcattggaagagtagtgtctagtactaatttcctaatgatgtggagtttatagaaactgtctagtgtcttgggttgggaatggcctaagtcagctacaagcatatgtgaaggagataaagagaggagagagaaaaaaaataggctatagtatgaacttcaagacataatatgcgtatgacatatgggattacttattaatgatgtagtatatatttatagttaaatattgcatgaattaactattggactaactatagattaattagagctaacagttgactataccattaaacttgctctaattggactggaactagaatatatatatacacttactagaaaaagggtgatatgaaaaaaagtccaatcatattcaaatactaaaaaaaataccctcatacctttgtgtttgtaggagtggggttttcctacttaaatactctctccgtttaaaaatgcaaggcctataatttttctacagtctttaatgtaaaaccatttaaaattgtaatgcctatatatttttttctacattcttcagcttaaaactttaaggggactattaaaaatctacgacaagtttttttggaacctttaaaatttactataatatagtatagttataatataattttaccataactataatataacttatataaagtattaaaaaatatatgcaactttttatactaaattatatagatgttatagtgagttataatttgtttaactatttgtaatatcacgttgtaactatactataatttaacttatatgtaatatagtacaaaccttcccgtagcatcatagggttgaaaatttaaaagctagggaagaaaacacaattccacaagttctctatgaaatccaaactttaattattagcgaaacattacaaatgttggttctttaagctatatccctttctttacttcatgcattgtggcacacgagaagtaatgggatggcttagctacctcttttttttttttcatacagactttgtgtactaggtgactccccatgcttggctaggtaattacaaagcaattctcaatatatttttttcgataatcaagctatgagtaaaaaggaaaaaaaataaaacatcggagtttatcatgaaaatacaaatgatatccacgctttaatgtaaaacatattgataagtatatatattaaatattataaagatgatagatagatttggtaaaatattatgcgaatgatgtgagaggtgacgttgtatatgcttgcatgttgatttgtagaatctatacctctatatatctatactaattgagcactttctactagctcccacgttaaccagaaaaatataaccgttagataaataagtggtttaatcaggaccgtagattgtatgttatgcttttacattgtgtagtggtcgtgggctctttcaaaaagcacatctaatctaatctccagccaaagcgtccgggagaggcagaactaatctccaagcgcacgtacgtatcacgagaagaagagatgggaacgcaaggagaggaattcgctggaggcagccacgagcagtacttcttcgccaatgacgggtgtcgctcgagccatcaatttaagctccattgactcagaccctgaccaaaattgatttttatctgaaccaacatcaatcaggactccttcaggtaaggcggtacgtatacggtacacacaaattccatgcagggcgatgcatgaaagtagcaattctgatgttaatgactgcaggcgcaggttgcagattgatctccgcagaggagccgctgtatgctgggggcggttgaatgcaaaggaattacgatgagaagtttttttcaatccgcttacatatatgctgataaaacgttaatagcaatggtatcaccaggaacagcgcaaggttgtaaatcaactacagggcaaggagtacaaggtgatataaataacctggcaaaataggcaaaaaatacctgatggtactgtattccaaaatcaacgaaaaaaaggtgcatgtattgacgtttgctcctgttcgacctccactagctcctttacacaataaatttcatcaatattataaatccgcgattcattatttttgcacttcactattttgtagatttaattaatatatgcaacgcatgcttttgttaaagaaatattttgttcgcaaaaaaaaataaagaaatattttcttattccacagtgtcaaaacaattatgaaatttaatctactgttttctagaataatatttgaaaattagaattaacacttatactgattcggctctcgaagaaaactcccatgttaactagaaatataaccgttgattgggtaaatcatatgatcgtaatgtattgtgaatagtattgaaaattcatattaaataagaaataacattgcgaatactatggacaccttattatcttttaagttttaataattccataatgcagattaataaatattgagtgtatccatcatagattttatgtttcatattttattaaaataatatttttaatttcgaaattagtaattaccaagtattattttattctaagaaattattttctaaaatataactaacacattcatcacatgattaaaattttattatttataatatgaatattaatagagtatgcaacgcatgggttgggagaaaatggacattatgccactctcaagagtgggtttcgctgtaatgccactccgcaaagttgcttcgctaaaatgccatcgccaaggagtgccaacccgctgcttcgctgattctccatcttcgccggattaacgcacaaaatcggctgtgttgtgaccaatgtgcccctggctcagaaattaggttactgaggcaagagaaggggatcgagatgcagtcactcctcccctctcatcgttggctctagctcatggtggcgccctagatcgatctcgtcgccatcgccattccacccgctgccgcctccgccgccgccgtagtccccctccccccttgccttcaccccttcttgttgacgccgagggcagcctccggatgccgtcgtcaccgacatgaggtagaaacacggtggaatcgatggattgtacctggcatgagctagtcgtggggtaagaatttgcttgcctccatgctttcatttgtcagcttgatttttcatttactttgattgccgactgctgcgaatccgttagatattgctgtaacaatcgctactattttttttcttcaggctcaaggaggagcctgcccttagtttagctgtggtcgaactcgaaattgaccatgctattaaatctgtttatattgttgcgccggatgggatagtggagccagttccagttcaagttccagctggtggttttgccccagctagttccgatatcgattgggatagcctagagattcttgctcgaaatgatgatgaagggagactatatcgttggggaagataaattctacgagctattgggtttgagggctgaagatgaggttgcagatgaggctagacaagctgctgctcgaggtggaggtcctgatgttgctggtgctgctgcaggtggtgttggcggtgctgcagcagctgctgctgctcctggtgcttctcctgttgctgatgaggatgatataactggggcagcaattcctgtcgatgatcaagtaccaggggagagggtcatggcctatgaccccaataattcttgcatgaaggctggcacagtgtaccctaacatgaaggaatttagattggcaatgagacagtttgctataaatgctgagtttgagttgaagttggtgaaaactgaccctgaaagatacataggtggttgcaaagttgaaggttgcccttggcatatagtggggcataaacaacctaaccagaagacagtgatggcatttaatttcagtgatttttgtttgattttggcataatggttgcagaattgatggattcttgcatttaatttgtaggtgactgtgttacaagacttgcatacatgcacttctagcagcagaagaaagactaccacaccaacagctaaatgggtggcaagtaacgcaattcctattcttaaaaagaatccaggtatgggccctaaagccttgtagacccaactaatggaagatcacgagtgcacaattaactatgacactatatgtagaggtagagaaaaggctatggttgagctatatgggacatgggaagaaagttttcacatgctttatagatggagggcagaggttctaagaacttcactagggagtgtgatagagatagacactgtagaggttggtgggaaagtattttttcataggtttttctatgctttgaggccctgcatagacggtttcctataggaatgtaggccatatattagtatagattccgttgctttgaatggaagatggaatggtcatttggctgctgccacttctgttgatgggcatcactggatgtatcctttagcttttgggtccattaatgctgaaacttaggataattgggagtggttcatgagacaacttcataaggctataggagatgtgaatccattagctatttgtactgatgcatgtaaaggcttagaaaaggttgtacatactgtgtttgagcatgctgagcagagggaatgcttctggcatttgatgaagaactttgtgaagagatttggtggtgatgtgcactcacacatatacccagcagcaagggcatacaggaaagagatttggcaaagtcacacaaaagaagttattgaagcttgtagtgatgttcttccttggcttgaagcctatcatccattgaagtggatgaggagtggtttcaatccagcaataaagtgtgactatattactaacaatctggcggagagtttcaacaattggatcaaggattataagacattgccaatatgtgaccttgcagacaagacagagtgttggttatggtattgtggaacaagaggagaagaattgcagagaagatgactgggaacatcttgcctgctgtaacacagaagcttaaggcaagaactaggggtttgggtcacctctcagtagtgaaatctgatagcttctgtgcagagattgttgacaacagcaccacccatgagaaacatgttgtgaaggcttacaatcagtactgctcatgtgaggagtggcagcacactggaaagccctgtcagcatgcattggctttgataacctctcaacaaaatagggatgtcaacattgaggactttgtgaatccctatttttcagttgagctgttcaggaaggcttataggagaattatagagccattgggtgacaagtcttactggccacaggttgaattgccatgggtgttgggtgcacctttgccaaagaagacaaatggaagatacataaagcttaggatcaaaagttgcctggagggtggtggcaagtctaaagccaaaactactccaactgataatgactcagggaagagggtgctggtaaggggcaagagaagatgcaagggatgtggggaatttggtcatgttcaaacaagctacaagtgttcccttaatggaatcaaaaaaaggctagtgtactaataccaattttttttgtctggagtacagtttcataactgtaatgcattattttgtattgtaatttgctggaagaggaagccaaggaggaacactacaaaatatgggaacacttctgacattcctagtcccaaaagaccaacagtgcagacaatacttgaagaaagtctaggaagaattacaagaaggtaatcatctaaaatacattcacattactttagattttgtcctatttcggtctattcactcatttgttcaaataccatggcttacagccggctagcatcattgatgaagggaggagctcagaacattccagcttctaattcacagccagctgacattccatcttcaagctctcagcctgctgacattagggcttcaagctctcaacctactgctgacattggggcttcaagctctcagcctgctgcttcaagctctcaggctacaagcaatgcagcaccaagctggcaacccagaatgtctcctagaaagaagctcacaccaaagaagaaacttaaaacctgaacttagttttagtctggtcgaattagcctaaaaacttcatctattaggccattttgctccatgaggagtccaatgtaatatatttgaacctaagtgctatgtgtgaacctaaattgtgatgtggacaaatgcttatgccatgttttgtatgaaactatggatgcttgattatgtggtgcactgctgcaccgctattgtctgaaattatggatgccttcactattgtctgaaattatgtatgcgtttactgaatttatgtgccattgtctgaaaatatggatgcttatgctgaaattatggatgctattgtctggaattatgtgttgcaggactatttcctacaaaacaacttcttgcacttgtgctgaactgatgtttcatggagatctgtcacctgtgcataaaacatgccaaaattactcatctcaaatggaaatgcccaaatttttgtaattgcacaacaatcgaaaataacataataccattcctgatatttcagcaagcaagcaggacaatcaaaagatgccattcattagtctaaatagatacattgcaatgcttacattccttgtactaattctagggaagccagttcacttgaaaatcatcacaagcacgccaataaaacaaagaactagcaggcctatgttgatcatcactaaaacttgaatccaatttatcaacttatccatctttccatcatcaaccgacctcagcttcatctctacaggagcagcaaccatatgctccaatgcaacatcactgggagcttcatcaactgcatgtagactcaatccttcaaccatcttcttgtaacattcgatccacttgaaaaacttgcaagaatttggcacctagtaacaaatgcacattagtaacaaagaccaaaagacaccaaatgcaacaaatggaatactcacatcttgttcgttttcctcacatttgaagaaaacctttccaccatgcctcatcgatctgcactcgactcctgcagcgccacacctagggcaacgaacgagagggaggccggccgctaaatcctacaggcagccgagcatgatatgagctaccttgcgacattcccaaatcatcgcttccggcggcaagtcttcgctgcatgatgacgacggcttccggcggctgctctcggtgtcggccaagcgccccttgtttcaaagagaggaggacgggttattcacatttaatttgatggtcagaggcgaattgaaagctaagctgtggtaattaagacccccgggggaaaatagggatgtctcctacgttacccataatatgtagaagtatcgacgtaatttcatagagtcattcgatatgaatgctacatgaagaacataagccagatgatggaacgcggagacctaggatgtagaagatcataacatgagcgattcggcagatttggattcctttcctatatatccacttatgtggtacttcatcatacgattcatataagatctatctgtctagagatcatcatatacatctagaaagccgtatgctttggaagaagcttgtacagtttgggaaggggttttttgagagaaaagaagaatctacttcaaccgatatgcccttaggcacggccatacataacatagaaatcacacgtggaaggggtgggcaattagctagagcagcaggtgctgtagcgaaactgattgcaaaagaaggtaaatcggccactttaagattaccatctggggaggtccgtttggtatcccaaaattgcttggcaacagtcggagggagggaggaggagggcatcggcaacgcggatttaccgccgccgccgcagaatggtcaccgccaccgccgcctgcagccctctcaatccccttctcttgtctcagtgacctaatttctgagccaggggcacattggtcacaacacagccgattttgtgcgttaatccggcgaagatggagaatcagcgaagcagcgggttggcactccttggcgatggcattttagcgaagcaactttgtggagtggcattacagcgaaacccactcttgagagtggcataatgtccattttctcatgggttggcatactaattggtatggaggccttattcaaataaatctaaattcactaactccttgcctttgttttatattatcaccatgcatgtgtaaattgtgctactattttatttcggggtttttacagctgaaagtaacttcgataaatactatggaacatattatcttttttcaggtatgctatcgagacttcttagttaatttgtttatgctttgcacaagtcaaacatagatttatcacacaagatttcaggtaagttcaactattagataatataacagttgcttcaacaaaaaacattttactgaatctatatataatttttaagggtgatctatatctacagtgtttgagaaatagattatatttattataacgtgctttatatttcttattcattcctccccttttataaccgtgatattctttttgatgatattgatactatatttacatacatccatgagtaaagatcatgtaatacaaaggataataatgctgacgatgctcattgaccgagatatttcacactttcagtttaagatttccatatttctaatataggtgaaaaataatatgttataaattaaatagcccgtgtgaatgcacaggaccggcacaaaatacagctgtatgcttattaattccaattttggaattacatcatggcgagttgtaaaaagttgaaaaaaatgaaattatgaaaaaaaatatatatttgagactgtaaactaagatggatatctatataattttgaatgaaataagagaaacttattatggattctgttataataattgagacagcatgcagtacaccagttcattgagtttttttgaattgaattcatgaaaataattaccaatttggatatctatgattgagcctgcaaactaaggtaccttggtatattagctctaaaattatgattctcataaattttgaattacaaattatgaaattatatcatatttattttcctgtgctaactatgcactttgaggtagtatgcatgttaatcaaattgctccaaccatgctttaataataacccgtgcaacgcacgggttgacgactagtctatctatctattatatactaaaagtccattaatcttcctacaaacgctcttaagccaccagttggcgctctaataaattagagaaatcaaagaaattctgagaaaaaagaaaagcatctatccgttgattttaaaatagtgggtccactattagaaaccgtcagattaactatattgatcttaaaacgtacaattccacaccatccgtaggtacgtacgtacgtacggttccatctccctccctcctttttcttttcatatatatataatcgagataacagttaatatagttaaattttatataatcataacttatatgattatattatgatatatctcttccaaaataaagtttacaccactatatttttacccattaaataaaggtatacgtgaaccctttatgtggagcattattttcaaataatacactatttaaataaagtttataaagtttatatcgttacattctgtacgcattaaactaacaaagaaatatattaactaatttatacttaaacgtgctattttagactttttaataaaggccggattaattttacgagtctttacaattatttgtaccataaattatatatctatttttatttttcaaataaatatataattttaatatctatattagatttattgcgttctagacctacatccatcttgagtgctccactaaataaaagaaaatattaaaatttgtcattgaaaatcaaaatatgctagcttattttttaatgaaactgttaaacccattaaaagtacattattagacatctaatgactttctaccaacttaattaatttcttcataaaaaaactttattaattcctcaaaacatacacctgggggctatttacatatacgaattgatcttgatgcttttgtaaataaatgatattttaaatttaaaagataaataaacgatcttaaaatgatcatagcatctaaatcatacatatgattgctcctagcactcctaaacacttctaagtcgctatgtggcattctattaattacaaaaacactcatataatcgaccatcggtttccacttcaaccgatggacccaatttttataccatcatatctatcttttcggaaaaaacaaattctatcagaatctctgtctggctcactgcataacatgcatgtgtgcgctcctataccttttaaaccggtagaaccattgtttctaacaagtgtttattcatggtacatgacattttaaaaatattactgtgcaatgatatttcgacgttattgtattcctgctaggttgcgtggagcctctcattcactctacatgaaatgttcataggtagatcgcctctcaaaatatatcaatcatattaggctatataaacccgtgcattttttgtgtagattaatgtcccacccaattcatcctttaacatattatgataatatattatacaattaaaaaaataaaaacaccttaatttttattttacacttacttttactttcgttgacatgttttctaaagaaaataaatctaccttttttttaaaatgatgaagaatattataaataattacttatagatactacttatatttgatataatataaatctaataggttagaatattattaaagaattaattaatgctgacaaaaataatgtatggagaaattgtggcagatgttctcctgttaaatgtcgcttttataaatacctcaaacttggcgtacgacgcatgcccgcgtgaatgcgcgggctaccttcctagttaaataaattggacgtgatatatgatgttgtatgcttgcatgaggttaaataaataattattgctaatgggtgatgatgtggcatggttatatggctataattataactttatgaaaatataggttagattgtggcatgattgctgattgccatggttgacctatatatagttgcacgaccagtggagccccctattatagagagacacgtccaaacaaagacctcgacctctttccttcaacgaagcttcaacgacgcgcgcgttctcacaccttcttccacgctgaaacggtgtggaactgtggatcattaatttacgcgctaaatcaccggttaggcctcgtttagatctaaaaattttggtaaaaaatgtcacattaaatgtttagatatatgtatagtgtattaaatgtgggggaaaaaataattgcacagtttacacgtaaattacgagataaatcttttgagtctaattacaccatgatttaacagtgaacatttgctaatgacggattaattagttttaataaatttatcacacagtttacatgcgaaatctataatttgttttgttattagtctacgtttaataattcaaatacgtgtccgtatacttcgagacctttacacccaaggaacacccttatataagctggggccagagaagcgacgatggagggagagacatacacatccacaatcggcagctattaattacacagagagctcctagcttgccagcttgattaagcaaaggagtgacgtcgtactgcactgcgcagccatggcgactctggagacgtgggtagggttcgggtcggccatggccggcgtgggcttgctttggtcccggatgccggagcacgtccacgaggaggctaggtacatcatcagtagcgtggtccccatggttatgtcctacttcaacccctacgagcagatcaccgtgtccgagtacggcgaggagcggttccggcggaacaagatgttcgacgccgtctccacctacctgaggagcgcgtgcctgggcagcgcaaccaagctcaaggccaagctcggcaacaacatcggggatgacccgcttgtgattctagacgagaaccaggaggtcgtcgactgcttggatggtgctcgcatgtggtggaggctgtaccccaaggcctccaagaacacagggagcaccatcatcagcatgttccccggggacacggacgagccgcggtgctacaggctggtgttccacaagcgccaccgccagctcgtgctcaagacctacctgcccggcatcatccggcggtggcgcgagctaaccgccaaggaccggcagaggctgctgttcaccaaccactccaaacaaggggagatcagcatgtggaccagtgtcccgtacaatcccccgtcgacgttcgacatgctcgccatggaccatgccaagaaggttgagattatggacgatctcagggcgttccagaaggggaaggaataccactccaaggtcggcaaggcgtggaagcggggctaccttctgtatgggccaccgggcactggcaagaccactatgattggggctatggccaatttcctcgactacgacgtctacgacctcgacctaacatctgtcaaggataacgccgagctgcggaagctcttcctcgatacgacggacaaatccatcatcgttatcgaggacatcgacgccatcgaggtcgagctcactaccaagcgcaagggcaagaagatggacaacagcgacgaagtcgacaacaaccatgtgctggtcgagctttccaacaagactgatgataaaagcaaagtgacgctgtcaggcctactcagcttcgtcgatgggctgtggtcggcgtgcggcagcgagagggtgttcgtgttcacaacgaaccacgttgacaggctcgacccggcgctgattcggccggggaggatggacaagcacatcgagatgtcctactgccgcctcgatgcctttaaggtgctggccaagagctacctggacatcaccgagcactcgctttttggtgaaatcgggagactgctcgacgagaccgacacgactccggcagatgttgccgataacctcatgccgcggggtaagaggaacggtgaaatcagtcgactgatcgatgagatcgacgcaccggcagacgtggccggtaatcacatgctacggtgcaagaggaagagagacgcggacgagtgcctggcaggtttagtggaaacactgaagaaggccaagatggaatcagcaacacctcctatggacacaatcgaggaagaggccaacaaagaggaacaaacctaacacagaagaaagctagacaggggctgatacatgatgagggctgctacttcttggcctcctcggtttgcgtgtcctattttacctgacttccgtgtaatggtgcgtacgggtttattagtcacttaagctagcataagccataccataaaatggcaaaatatataaaaatagtggtgtattacgacttatgttctggatctattatttcacgctccataattcgtctggtcaaccttgtaaattctgataattatatgtttatatatatgtgtggagattatggatatcccatatctacacggcgacggtatttgggctgaatacaggataccgaatatagatagaatatcttatttgtatctcgggtttgtttcttaacttgtacatcaaggaaacaccttgagacttagtcggttacggctgtattttatctgtatctacatattccgttagggatatagattatcttttgtaacacggactccttcccatatataaggggggtccgggtgcctctaggggcggatgttgattttctccaaatcatacaatcaataatacactcggcggattcatccccggacaggagtagggtattacttcttgaataagaaggcctgaacctgtataaatcctttgtctccaaacccatacacttttctagcttgatagccacccccttttattattgccgaaatctagtttcgacagttggcgcgccaggtaggggtagcgtcaagcttttcgccgatcagtgcaatgggttccgtctccggcatcgacgacctcgtcttcccacccgggcagacgtttcggttcggcagcctcgacttcgtcaccaacaacttcggcaagatctctctccttgactcggggtcaaaccagtcgggagagaaccggatttcagtcccgtttggactcccaaacgcggctaaaagttaccccaagaccatctcaatcgagtcggcttcaaaccactcgggcgagatcgcatcttctccaacgacaccagatcaagatgatggggcttacccaccggtcttgatgaagctccccgatgatttggcggccatctccatcacgacagcgtctccatcccgtaggcctaggcggaagtcggcttcaacaccgatctcgcctagcttcagggaagtcggcgtcatcctccaaccactcggcacggtttcgacggatcagctggatggctactacagctctcccaccgtcgactcgcgccccaccgacatcgtggaatacgacgagttcagctctctctacaacgacccggatctcgacgacttcgacgaaagcctagatgacaactacacccctctcttcttcggcgtcttcatggccaataacgagacggaggagcaacgccaagcccgggagaccgaagcacgtcgcgagactgagcgtcgccgactggaggaggagcatcaagcacaagaacaagaacggcaacggcgtgagcagcaggagcgtgagcggaccgcgaaggaggctgaggatcgacggcagcgagctttggaagcagggcgccgagcgcgtgatctcatcggccaacaagatgttgaaggaacgccggttttccgcacccctcaacagaatgcggttgccgcgatcaccctcctcgacaccctcctcaaagaaaacgagctcaatcaatctgatcacgtcgtcaacatcttgaaccagacgaagaccatgatcgcggcttcagtcccagtcaactccgaaagcgtctacacgccgactggcagccgagttccccacttccgatctcatgactaccgtcatccaagcctcagcatcaccggcgcaggatccaatcgcaggagcaggggtcacgacgagcggtccattcactcgcctcccgatcatcatagggagcgccgagtggaacggcctcgctcaccacctcgtcgccgccccgtcgatcttcgcgacacaatcatacaacgccgagcagctcgaggccatcatcattcgccggaccgccacgacgacgaccttgacggagtagcagccttcaccgatgacctgcgtcgagtggattggccagccggcttcaagccgactggaatagagaagtacgacggtaccactaaccccgaatcgtggcttaccgtctacggtctcgcaatccgcgcagcaggaggagacaacaaggccatggcgaactatttaccagtggctttagcagattccgcccgatcttggctccatggattgccccatggtacaattggatcttgggctgaattacgcgaccacttcatcgccaacttccaaggcaccttcgagcgtcccggcacacaatacgacctctacaacgttattcagaagtccggagaatcccttcgagattacatccggcgattttctgaacaacgtaacaagatctccgacatcaccgacgacgttatcatcgccgcatttaccaaagggattcgccacgaagaattggtcggcaagttcgggcgcaagcctcccaggacagtcaagctcatgtttgaaaaggccaacgagtacgccaaagctgaagacgccgtcaccgcatcaaagcagtcgggtcccagttggaagccaaacaagggtacgccggctacgggaggaggtggaagtaacaaccataaggaccgcaagcgtaagcctgaggaacttgttgcaaccgccactcactcttctcgacagcgttcgcgcgtcaacacgttcgacaagatcatgaactcccaatgcccgcaccatcctaactccaaccacgtggccaaagattgtttcgtctacaagcagtttgcggagcaatacaccaagactacacggaaaaactccgacgaagaacaaagcacgtcgaggaagaaggacgacggcgacaccccggcaggatttcaagaccaccgcaaggaactcaaccatatcttcggcggccccctggcttatgagtctaaaaggaagcaaaagttgaccgaacgggagatcaatgctgttcagcccgacacgccccaatatcttcgatggtcagagattgcaatcaagtttgaccgctcggatcatcctgaccgagtggtccacccggggcggtaccccctggtactagacccagtggtccgcaatgtcaagcttcgcagaaccctcatcgacggtggcagtgcactcaatatcctcttcgccaagaccttggatgatatgcagattcctcgctccgagctaaaaccaagcaatgcgccttttcacggcgtaattccaggattatccgcaactccactcggccagatcactctcccggtcacctttggcacccgggaaaacttccgcacagagaatatcagctttgaagtcgccgatttcgagacagcataccatgccatactcggacgcccggcgttagccaagtttatggccgttccgcactacacttacatgatgatgaagatgcctggtccccgaggagtcctatccctacggagcgacatcaaacaagccgtcacatgcgacaaggagagttgcgacatggcccaaacccgcgagatggcgtctgcccgagaggatatccgactggctgcagccgcgacgagcgaaggagaagtgcccgctaccaagacttcaaaaagtggagaaagcgaagccaagactaaaaagattcccctagatccctctgattctactaaaactgctgtaataggcgccgagttagattgtaaataggaaagcgcgctcatcacctttcttcagaacaataaagatatctttgcgtggaaaccatctgatatgcccggtattcctagagaggtgattgagcactccttacatgtcaaagaagatgccaagcctatcaaacaacgactccgccgattcgcacaagacagaaaggacgcgatcaaggaggaattaaccaagctgttagcggcaggcttcattaaagaggtccttcatcccgactggctggcaaacccggttctagtacggaagaaaacggggcaatggcgtatgtgtgttgattatactgacctcaacaaatcttgccctaaagatccttttgggttgcctcgcattgaccaggtagtcgactcgaccgccggctgtgagcttctcagttttttggactgctactcggggtatcatcagatccgactgaaggaatccgactgcttgaagacttcattcatcacaccctttggagcatattgctacgtcaccatgccgttcggactaaaaaatgcaggagcaacttatcaacgtatgatccagagatgcttctcaacacagattggccgcaacgttgaagcctatgtggatgatgttgtcgtcaagaccaagcaaaaggatgatttgatcttggatctagaagaaaccttcgcgagcatccgcgctttcaggatgaaattaaaccctgaaaagtgcaccttcggagtaccgtcagggaagctgcttggttttatggtgtctcataggggcatccaagccaacccggagaaagttactgctatcctcaacatgaaaccgccaagtacccagaaagatgttcagaagctgactggatgcatggcggcgctcagccgatttgtttcaagacttggcgagcgggggatgcccttctttaagctactaaagaaaacagacgacttctagtggggacccgaagcacagaaggccttcgaagatttcaagaaactcctcaccgagccaccagtcttagcttcaccacatccgcaggagccgttgttgctgtatgtatcagccacctcccaggttgtgagcacagtcttggtcgttgagcgcgaggaagaaggccatgtccagaaagtccagcgaccgatttactttgtcagcgaagtcctagccgactccaaaacgaggtaccctcaggttcagaagctgttatatggtattctaattactaccaggaagctatctcattactttcaaggtcactcggtaacggtggtcacatcatttccactcggtgatatactgcacaaccgcgaagcaaacggacggattgctaagtgggctttggagttgatgtctttggacatatcattcaagccccgaatttcaatcaagtcccaagcgttagctgattttgtcgccgaatggaccgagtgccaggaggatacccccgtgaagaagatggagcactggaccatgcattttgacggatcaaagcgactttcgggcactggagcaggagtggttttgatttccccaactggagaaagattgagctatgtgctttggatacatttttcggcatcccacaacgtcgccgagtatgaggcgctccttcatggactacggattgcaatttctctagggataaagcgtctaatagttcgaggcgattcgcagctggttgtcaaccaggttatgaaagagtggtcctgccttgacgataatatgacggcatatcgacaagaggtacgcaaattggaagacaagttcgatggactcgagctcagtcacgttcttcgacataacaatgaagccgccgacagacttgccaactttggatccaagcgcgaggtggcgccctccgatgttttcgtcgaacacctttttacgccgacagtacctcacaaagatgctactcaagttgcgggcactcatgacgtagctatggttgaagccgactggcgagaacccctcatacgatttttgacttctcaagaactcccccaagacaaagatgaagccgagcggatttcaaggcggagcaaactttacgttatgcatgaagctgagttgtacaagaaaagcccttcagggattctgcaacgctgcgtatctttagaggaagggagacaattgctgaaagacatacattctgggatatgcggaaaccatgctgccgcacgcaccattgtcggcaaagcttaccggcagggtttcttttggcctactgcagtgtccgatgccgacaaaattgtgcgcacgtgcgaaggttgccaatttttcgccagacaaattcatctaccagctcaagagttgcagaccatcccactgtcttggccgtttgcggtttgggggctcgacatggttggcccgtttaaaaaggcagtcggcggttacacgcacctctttgtggccattgacaaattctccaagtggattgaagctaaaccggttgtcacaatcacagcagataacgctcgagacttcttcatcaacattgtgcatcgatttggagtgcccaatcggattatcactgataatggcagacaattcactggcggagtttttaaatacttttgtgaagactttggaattaagatttgctatgcctcagtggcacatcccatgagcaatggacaggtggagcgagccaatggcatgatacttcaagggattaaagcgcgtgtttttgaccggctgaaaccctatgccggcaaatgggtgcaacagctgccatcagtactttggtctttgcgaactacacccagtcgggccacaggccagtcacctttcttccttgtctatggggcagaagcaatgttgccgagtgaagttgaattcgagtctttgcgctttcgtaatttccgcgaagaacgctatgaagaggaccgagtggatgacttgcaccgattggaagaagtccgcgaagcagctttgattcagtcggctcgatacttacaagggttgcgacgttatcataatcgcaatgttcgatctcgtgcttttctagtcggcgacctggttttgaggaaaattcaaactacacgagatcggcacaagttatctcctctatgggaggggccatttatcatctctgaagtcacccggccgggttcctatcgactcaagcgcgaagacggtactatcgtcgacaactcttggaacattgaacatcttcgtcgtttctacgcttaagcttatcattgtacttccctatcttgactgtcaacatcaagttttcttcttgaagttgtcagtcgggggctatcatcataataatggagtgtgactttttatcaatttaatttgcttacttggtctatcattgccttgtttggttttttctacttagtctgcgaggactgaaagtttttaatagcttctttgggttttaggatcgacaaagcttgataaaaacttttaagaaatcaaagactttactagaactatcaagcacagcataaatacaccagtattgtacaaattgagcctccatttgttacattcatactcagtcagaatcagtcctttcatcatcagagttattgttgctcggctgaaggtcgttgttgcggaattgctctacaacatcacttgcaatcttgtcagccgcattttgagcattgctgataagatcaagagcggcttcttcacttgtcccgtctgcaaagccatcaatggcgtcaatttcaattcttgggtacaaggatttggtcatcgccaatgccatgctagctcccatacttccagctttcttgatattcttgaagtatacatccggtgcaactctcagcttgtcaaagatttcggttgcgtcaagtgtacttcgaccactgttattaaggaacatagcttggacgagtggtgtagcgacattggcgacttcatctcttgttccttcaagcctcttgatcttaccaaccaggacgtcaaactgagcttgagatttgattttacgatctacaaaacacatttatgataagaatctgctgcatttaaaagagagaagtccagattgttagctggcagtaccttcaacctccttcaaggccgagtccctttgcgcagccagttctactttgtcctttttcaaggcttcaatttgtttctccatttgagtcattctggcagcttgcgctgtttgaaatccaaatggttgaggatacagttgcgacggcataaattaatgggacagatctagaaattaccttttgacgaaccactcagctcgaagtttgaatcctggagctgggcaattcgttcccttaattccttctctgtctttttggcgtgctccttggcctcatgtagctggttcctaactgcttcaagagttcctaaatgaggaaccagcttttccaaagttgtagtcttggcctcgttgcgaagatggattctctgcatgatggttcatggtttaattctgctaaagagagaataaagttatcaaaggcagtcacccggaagatttacattcacgatgcgagtggcttctccaagtactttcttcaactggcacacttcctcatcttctttttgacgatttatgacaatgctagcaacttgtgagttctcgtcccaccatttgagcaagataggaggacgagagtcatcagccgcttttatgcgaggaattgcttcttcgtcatcgcctggtgctcctggtgtgtttccaagacattagacgaataagttggagttatttaaatcggcatcacttgagaagatgggttacctgaggatgttcctagctgagcgtgaggtgatccttgttctttatttggagatccaatcatcgggtcgttaccagcctccggtccttgagaagttgtcgtctgcgtttcaacttcggggatttcttggtcgggacctacatccgactggtttccagtcgggggctcttgtgttgttgcagtttcagctgctgccgactggtttccagtcggcggctggtcactcggatcggccttatcacctgaatcatgggcgtcagtcggctggctttcggcagttggctcaggatccttggataaacttggctctgtcacagccggatcaggatcttttccagttggatctatgtcggatggtttcctgcaaagtgtcctttcaatattcagtattattttcgtgagagaagcatgccgacatgaaatggtaccaagaggtttatacctggaagatgttctaatttttggcattggacggccagccagttttttcctggacatggtacgctttgggagtttattaggcgagcccttgtccccagatttgttgtcatcatcttcgtcgttgtcaagcaccagttttctcttgcgagaacctgtctgaccagttggattggagatttgaggttgcggatctgatctgattgttggccctccacctccctgaacggtgtgttggcgaggagaccggcgctgagcgattgggggatcagatttcatcaatacatattcctgaatgagatgcctccacggttagttaactcaacataaagacgagataatgttttggtcataggttgaggatttcagatgcatacctgtggaggcggattgaatgcgttatatggcacaactggcagctgatgtgagtagctgacgacaatagcatttgagaagattttatacatcctctccttcatgattttaaagtccagagagtctggttcttcacgattgggatcatgcttgccgtcaaactcgaacgccgtacgggatctttctttaattggcgccaatcggcatttgatgaagtgccgagtgatctgctctccttgtaagccttgttctttgagctttaacatacgatccatcaattccaaggcttgagcagcttcatccccgatcggaagagagttccaagtatcttggtacaccggaggaagacaagagtactcgggaagagcaggctcaggattctgaacataaaaccagttcgcatgccaccctttgtttgaggtcttgaaaggcatagagaagtacttttggctcagggttcccctcaactgaaatcctgcccctccgactacacatggcttattcttgttcggttggggcttgagaaaaaagattcggcggaacaaagcaaagtggggtttaattcccaagaaggcttcacaaacatggacgaaattggcgatatggactatggaatttgggtttaggtgatgtaagctgattccatagaagtttaatatcccgcggaaaaattttgaggtcggaagagcaaagccgccatagaagaaatgagagaagaccacaacctcgtgtgtatcaggggacggaaaagcctcaccgcacgctggccgccacccgatgatctccttggcagggagaacgccgtgcgccaccatctccttcaggttctcctccgtcacgtcggatggcgcccattggccttcaaagctttccttctcttccgccattaattttacccgaatgcgctggtttggttcgagggatggctggggagaagtgagggattgaggcggtggatcacgggaaagattttgatgaacttttcgaaggcggattcgagtggaatggtgaaccctagtttgccggcgctgctctgtactgtagcagggagtggggaaaatggcgagagttccggcggggaagacgaagtgacgcttagatctcggattttcttgttaagggtatcggaggtgcgaatgggcttaggcctgaacagtacctcagcccagtatttttaacagcgtggcccattgtgctccttagggacttaggcatcttttgctttggcaattatgcgcacaatagtgttgcccaatgctgataaaatcctttttacgcggtcatataattctttggaattattgcaatgcaaattaaagggtgcccgacagaaaggcgttatgctgtttttgtaagcttttttaggctacaaaagctgtctgggttaacttggagtggcttgtttttaccatagtcatttccctggtatgttatatgcctgttttcattatggtaaatagtcatagcctaggctattagacttatttattaccataatttttataatacttggtgggtaatctttagattttttattcggatgcctgtcaagtgtgttcattcgtggaccttttagagtgttaaccactcggattctttttattatggctaaaaggcagtaggctaggatgcctctttaggcgccgcgtatgcttttgtcatatgatgcatgattgtgctattattttgttctcaactatatgtttagtttgttaactaatcacatagttgggggctacacctaattaggtgcatctattcgatgcaccatattctttatcttttcgccctttacagtcttcgtcttcgctactcggcaggccttagcatgaaaagtttgaagcactcggattattatctttgagaaggctatgatggtcgactgcaaaggtctcgggggctactgtggagattatggatatcccatatctacacggcgacggtatttgggctgaatacaggataccgaatatagatagaatatcttatttgtatctcgggtttgtttcttaacttgtacatcaaggaaacaccttgagacttagtcggttacggctgtattttatctgtatctacatattccgttagggatatagattatcttttgtaacacggactccttcccatatataaggggggtccgggtgcctctaggggcggatgttgattttctccaaatcatacaatcaataatacactcggcggattcatccccggacaggagtagggtattacttcttgaataagaaggcctgaacctgtataaatcctttgtctccaaacccatacacttttctagcttgatagccacccccttttattattgccgaaatctagtttcgacaatatgtgtgtttaattgtgtcattgataaaaatcttgacaacaagaaaccaggttatgtttgcgtgtcgtctctccaattaagggagaagatggccagactccggagctttttcttatgggaattgctatacagatgcctgtaaagtttttgaagtatacggacgcacatttgaagtattaaacgtagactaataacaaaacaaatttcatattccgtctataaactgcgagatgaatttattaaacctaattaatccgtcattagcaaatgtttactgtagcatcatattgtcaaatcatggcgtaattaggctcaaaagattcatctcgcaatttatatgcaaactgtggaattggtttttttctcacatttaatgccccatgcatatgtttaagcatttgatgtgatattcttgaccaaaattttttgggtttgcctttgctgttttgtttgtccagatctataaatgcgtcaacctacccaactcccatcctgaaatatttgcatggcatgtacatcaacagctcaatgtctctttgctggcctttttgtggccaggatcaatcggatttgtggtaaaaaaaagagtggtagttttcattgatatttaatataactaaacgctaaactgttgtgttaattcttaattgaagtactgtgttattgaacactgggctacttatactgaaatgccatgttcaatttttgctctgtttgattcggcattttttcaggttttggtaaaaaaatcgcctatatttttgtgatgtgctcagctagctgcacagccgctgctctggtgccttcagtctttgaccctgtttggtagtaaatatgtattctatgtacccttttttttatatgatgtattcatttgtataagttaaatcacaagttctcatgcaaaaattctattgcttagcctcagaaggacaccatgcttgatagtgttagatatatagcgcttccaatatttgtaagatagcttattttgtaggattctaagttagtttaattttgtgtattttttattgaggaaaataagtacatgaggctgccctaaattgtgcttgctgggtgtttctagcagtattaaagacaagttggttcagatctatgtaggattgtgctcttaaagatgcataatttttggacaatttgcattgcatgtgttcatggatggaaatatccatactttacatctgtttactgccatgctctagtgttgtgagcaattttgtgctgctcacatccttcatgctcctccttttcaatgctgatgattcttttcctttttcctgaagaacttggttggctgttgttcttgcagtaggtgttgtcctcgtgtgccgcattgaaggcaagctgattttctctatctctgggttagcagcgcataagatcaatcttgttgggaaagatgaggagatatgcatttgtaagctcctccatccctcctgtaggaccgaacagcaagaactaagccaaccagagaggggtgaatgattgtaataccaaaaacaaaaacttttagtggaaataaaagttaccctcgatcaacagatcgtggtctgaccgaagtagattggctgatttgaccgcctggatatcgtcggtctgaccggatcagatcgttacagtcgcctgaagccgccaccggtctgaccgccatgtacccgtcggtctgaccgccgcaatgccgccggtctgaccgctggtgtctcgtcggttagaccgctgaacccgagcaaacacaaatcgaagaactcttgacgtagatgacaactttattacttctctctgtgtttacaatgtgcaacaatagcactttacaatgtgcaacaacagcactcctcacgaaaatctcgactaaactcgaaaccctaactattctctcaactcaatgctctctaaagcgataccgggaggccacaccctccctctctatttatacatgagataggcagcctaaagccacgaaccaaactcatacaagaagtcctaattcacctaggaaaccttcccgtacaagaaacaaactttacaaactccaattgcaccaaatttgtacttcttccaaattcgactatgcatcccatacacacaatatctccatcgtatgccatatggaatcttcaccaaccacatgcattgatctttagcctaagtgtcccgcatcatatctgaccatccggacgtcaccttatctccaagatgactcccgatccatcaccggcaatactctcctgaggcatcaggtcactacacatgaatgaaacaaagaaaccatattcctaggccaagcgatctccaacttgactcattgttagcaaacaacaatattacatacgcatagtatctatctagaagccataaacacatattaatcacggatatccaaagaaacaacccgaaaccgaaaccgacacagagttggccggtcagactgtgggctggccggtctgaccgctcaatacatgtcggcctgaccggcaacacctgcccggtctgatcggaccagacaaaacagtactccctgttcatcacctgaaaatccaatcatctccaaaaccacttcgcaataatctccaaatatcaaaaccaataatctcagatgtcaatagttcttcacagaataagaataaaaaacactttaattttacaatctccccctcgatgaacacattggcaaacccataaaaatgttttgttgtttggaaaaataaaaacaaaagtggtaaaaagcaaaaagcgcactttgtgcactccgtgctcaatatcgaaaagaaaacttccctcacttttgaaaagaaagaaattcccccttgacctgaaaaacatgcactcttctcccccttttgataatgatttcatcaagcataggaattgtgttcattaatgtttaagagcttagcatacatatagcacatcaagtcatgtgttgccataagaaaaagatgaacccatcaagtcatataaattaatgaactatagtgagaatgatcccatatgctaattaggaactaaccaagaagtaattctcactaagcaaatcttaattactcagaatgatatttctattaaagcagagtaataaacaaagtacaagagacaagaaaggattaccgacaactccgggattcctccgacttcttctaccttactatctccctattctaatatacaaaaaaaatacactagagcctcttgtaaatcagctcatgctttggtgtgtgagtgaagtgagggagaggagctatatttataggcttcatatgacggttacagttatgggaaatgtcccaaacgccctccaaccatcattagggagcaattctggacgcccacgttgaaggttgggatgaattgggcttcgtggcagttcggccgaactatgggctggcccaaccgcctccagccttcttctatctcctgacatttgggtcccactttataattcttccagcgttggtccaataaataatgatttaatatagtttgtgggctcatcactccatgggctctagcggaaagtataattcccctccctatatgtttatttcctctcaactttagtactttgccacctgcatacaaatattcaccaacactagtggaaatcattagaaataaaccctaccactatggttgatgttttgcatttatggttttatgcaggtatttacggcataaattttgtatttaacagctgtcaacaaaaccccccacacttagctctttactcgtcccgagtaaaggttaaggattattgtggaataaaattttccaagatataatacaagtacacaagttattctaacccgtacctgtacatgtgaactttgcagtgtctaacttactatctcgggtaattgatgaatggaacggtcgtgattcgagtccttcttgttcctcctgttaatctcttggggttttcatatattttcgcaaaatagctttactcctcaaatgaccttctctcaaatcgctcatgtgttttgatttgtggatcctcaccaaggcatgtttgctgaattgtctctattctaaaaggctgtatatgtggagctcagtagggatcaatcggggcatacatgcatcacatattttgcaaagccaaaagactggacccaaggagatagcaagtcatactctctgatcaagaatgtgcatgtgtgtgatatgtgtatgggtatgtatgtgtatgtgtaaagtaaatttgttgatggaaaaaggaaaatagaagataataactcctttgatatacctcctcctccaactttctctctttggaaatttgagagagtgcatggctatctcttttgttcttttctttcatcatgccccatagtttgtatgagcaagattttttttctattttctctctctgtttttttatcaatgctccatacttgtatgagcaagactttatttttccttccattttcatagccgtgcccctctctctctctctctctctttaggaaagaattttggagggaaaagcataaatgccacagagtatttattctgtggataatggataaaataaataatggatgagagatgctagcttccagtgtagaagtttagcatagtgtgtgtatgtggagtgtgcgtgcgatcattactagaaaaataatttatcgccagaaaaatatcatagcatcaatgctaaaattatggcaataggtacatgttgccacaatcttaaaatcgttgctagccgtggtaataaatagtgtggtaataggttattgcaacgatttttatttagttgtaacaaattttgatattgccataaaatggatgtggcaaaaaaatatattgcaacacttcacatcgttgtaatagataactattgccaccactccatgtgtggcattagttctacgtaccaaattaaatgtttcaatattaatttatcatccatactattttcttttcttttgatatcttgtcatggctagaattcgaacccaatatctctccctcacgcgcgctctccattaccaactcacctacgcattaattttgtttaaaaatacatatcactccatttgagcctaccaatttgagatttgaatcatgaatttaagtatttaaaagatttcaaatgaaaaagttaagttgtagagctctaaatttcatacaaaatttatcctaatccgtgcccatacgaaaagaataagtcaaattatgagatgacaaattttttattgcaacgaatttgttgatcgtggcaacagaaaatagtgaaaagtaccatgtactatgcaaattgccacataaattaaaattgtggcgatagaacatgttttttgcaatagtaatgttttttgtggcgataactcattttctattgcaacaaaaataatgaataaaacgacgattgtaaatcgttgcaacaaaatatagttatttgccacagaaaaaattatcattgcgatagtacaatatattgccacggattatttttcgttgtaataaattagtggcgatagctcaattatcttgtagtggatcttgatcatgaaagtatgaaaagcatctcacacgagtcacaatgatttgactaagctcaatgtaatgtcaagcagcctatacatatacaaaatttttgcaatcataatcatatatggccttggtaggtaataatatagtcactggggagaattgctcgaaaaaattttaattttcacaaataaaatcccaagtatcatgacagttggacatgaatttctttcatcataaccatatcacatatttcagtcacttagattagcaaggttccctatgatagatgtttgttcacaagtgacaagtgttagcaaagaataaaaaatatacatgatcaatcataggaaaattctaattgttgagagttaatgttttcaattttcatttggagtcaaactaaattgtattcaagttttctaccaagtttcaatcacaaacaggggacgataagagaggagacacgcaaacctaaccacacggcgaaggatgacagaactgggccaggcaagggttgggcgaacacttggttcaaccgacccagccaagactcggttctggctgctgaattttgtacacagccgttggccagtgttcatcatgttgtcatgttgagttgatggtgttgcgcgtcgggagttccgaaaagacacccccacttgttttgtaccttgtctttatacaacaaaaacatggaaaacaaaatgggcttctaccggggtaaaatactggtgagccaaattttattcaagtaaatctagaaacgtgaagtgcctaaatttacttttattttgtttatttttatttttgttttcattttatatttttatagttttgtttttattatttttttattggcagcaatagaggtgatgggtaacttagcagggtggacatatgtgaggcgaggatgcacaaggtatttcgaattcttaccaaataggacttaccaagctttgattcggatgcaagaatgcaacacaactttgcatttgttttgcctggttccttgagcatctgtcttctcatagtccaaggagtgtggtatgaatgttgatgttattgtacactactccttagttgtctttttatttcgtgcaaaagtttagtggacaacaaatacccgagggactacaaaaaattgaaaaatttttatcatagcctcaagattagttgttcacatccatgctaaaaaggaattggattgaaaacttaataagcatggatcccataaatttgccataattttatttttgtcattttttttctttttacttgagagaaaaatgtttttttcgagagacatttcttttattcttaaaaatattttttttgttcaccaaacttttatttaagcaaaactcatatagggctaagataaagttatataacatagcaaaggagcatttggcaatatacgtaccgtgcaccttgagaggtgatatgtttctcctttgcctattttggcaattgatttatttttggcccttgacttacctccagtgtgattcgtgcttgagaactcacccgtcaaattgaaaagttttcctgcaggggttagtccacgaagggtatacatccgaagtccatgaaagtactggctctacggttcacttaagcaaacttgacaccacatcaactttgattaaagcatgctatttatcctaagcatcatgcttaatttaaaaagcctatgaatgtcgacgaccacccaaaccatagcatacgaaaatggaccgaggacgcataaccatgtatgatcaagccaggctaaactagaggtaagtataagtaaaagaaatggtgaatcttttgcagcatttcgtatacctgagtgtacttaccgccagcaagatgtatatgttgaaacttctggagcagtggcatggtcacatgtgattgtcaatctctcctccgtcttgatgtgggttgtggcggaggaaggcactttgaccacacctactcaagcgagtggttcggttatgcacacatctcgggtgcaaggaccttatgccttgaaggcatgttccgttggcacaatgctgtagagatgtaggatgcatctctttttgggcaaatatgcaagtgccaactggagtgtagcaggaaacacctagaaaagaaaatggcatatcctcttgcttgtatgcatgtaggtgttgctggagcgagaagtcgtgcacagctaggagtggatgaaggctaagccaaggcggcacatgagctcaatagaggggctaggtgtagcgaggcagcatgatcgctactagcgaggtgtatggccacattttaaagactcgcacataatgcggtctttgctctaaatgcagcccgtctactctcttgctctcttcctcttctcccatcttttatttttttcttccatctctcttttcttttcatttttgtcttcttttttttcctttttttagcaaggtaagactaacaccaactgcaaaccaagatggccttggttggtggaactcgtcatgcaagctcgtcgacctccccccacgcttggacttttgtgtcacaagacatcaaaaaccaagtgtatgatgttggagtctttataaagtgtgtttcaacaccagggatcaccaaaatgtacagttgatgtggctcccgagttcttaggcatcgtatgcccctcgttcttaatctcaacctgaaatggttactgaccaagaatacccgaaggtgcatactatcctaaaaactggttcttgcttttattggaaagaaaacttaccaagataatccggtgtatctcccggcagtgctttgtttatggtcacaagctcaaccatggagacatctcgttgcaagattagtgccacaaacacatacgagatttgcaatatttatgataaataaaagcatccacaaccacacttctaatcatgttagaaaggaggatcataaggtggttgtggtcctcgcacaaagaagcggcactaatcagacaagactctggagatttcttatgtgagcatgaatcctgaggaatttcgaaaaagaaactttcatgctcatttgtggagtgctttctctcgtcctccagagttgatgtctcaagctcgtctatggcctgaaagttctccttcccaagagatgcattgtggaagattgaggttgtttctagatagctgtcgagaacaataccttgagagccagagggacaaggtttaggcttgataggaggttgtgatgctggttctctggagagcaattcaagggtctcaccggaatcttctttttgaatggaacaatgagcatccggttctagaagagaattaggggactcatgaagtagtaccgccattacttcctctatcggcgcatcatcaggggggatgtctgtcaaggagttctcatgatcgttatgaaaatcacccctaaagtctagagcgcatcccgaagttcgaaattcttcgttcttctgtgctgatggttcgagagagcatcccatagccgaaactgatgatgtggaaggatttgattcggattcggctattaaaagttcctcgtgttttgattccgatgccttctagaggggttcggaatattgctctgtgaaggaggtgttttctataattcggtctagaatttccttgccttcggatggagttttgtgcatgaacgaccctccggcagtgatgtcgagatagaatgcacactccctatctaaacccgcatgaaaatgctataatagcacgtaatcgggtataaatagggttggaccagactgagctaaattagtgaatttggaccaggctacaccaatcgattctttatttatctgctggaaactcagaatttctacacgaatagtagtaatacgagttacagggaagaatgcgaggcagaacctgtcttggaatttctccctgtcaccgtttacacacccgacggtagatgtgtaccattgtttcgctctctcatgaagagagaacggaaacaatttccaccgaacagtctattgcttcatgcctccaatcttaaggcacgagcaaagttgttcaaattcccgcagatgatggtaggggttttcctggcctaaaccagagaaagatttctccctaaccatactaatgaattcaggacgaatttcatagccaggtgttaatataggctctgatgaaggaggtggctcgtaaaattcgcccggaggagcagataattggaaaatatattgtggctccatcagtgggaaggttttacataaattcttctctaggaaagaagaggtgaaggtagaagaaagaaaaataaaaagaatacgaggatgaacaaggttcagagatgaacagcaaccgttccccggcaacggcgccagaaatgcttgttggtatttcttacgatcacagataaaatccacaagcgcacggatataccgatgtaacacttcccctacggagtattccaagggaacgtgtgtgattatctcctcgtcaggttcatccaaggacacaaagctaatgtgggcaaagggcagagaggatttcctaatgagaaacagtgtcaagggaaagcttaaatttaatcctaacgtaacacttcaggcactgacaacccgctgttcccagattttgctctactacataccccggacagggaggacttaagtgctcttgagggctgtcaccacctctacacccacctcaaacgtactgtgggtgcgtagcaaccactggagattaattacctagacaccgcttctacgcaattaataactactctagtgccgatcaaacactaaagcaatcactataaattaatggactatagtgaacatgatcctgtatgctaattaggaactaatcaagaagtaattctcactaagcaaatcttaattactcagaatgatatttctattaaagcagagtaataaacaaagtacaagagacaagagaggattaccgacaactccgggattcctccgatttcttctaccttaatctctccctattctaatatataataaagtacactagagcctcttgtaattcagctcatgctttggtgtgtgagtgaagtgagagagaggagctttatttataggcttcatatgatggctacagtcatggggctcatcactcttccagtgttggctaaataaataatgatttaatatagtttgtgggctcatcactccatggactccagtggaaagtataattcccctccctatatatttatttcctctcaactttagtagtttgacacctgcatacaaatattcaccaacattagtagaaatcattaaaaataaaccctaccactatagttgatgtttttcattgatggtttatgcaggaattgacggcataagttttgtatttaacagccgtcaacagctagcatgcacaagaatataccatatgtattgaacaaagctctcttttctcaatttttcgtattgtcaaattttgctttataaaaccatgaggtacaaaagtcgcccacaaatcatgccaaaaggatgaatgattcccaattcttcacgatgaaaagcaaaacgagaagaatccaatggtttagtgaaaatatcagcaagttgcaactttatatccaaaaacctcaattcaatatctcctttctcaacatgatccctcaaaaagtgaaagcgaatatcactgtgctttgtgcttgattgtttgtcacaccctaaaaatcctaaatatataaattgttgtttaattggaatttttagaaatgatttttaaaagccttgaagagaagatctaattttaattaataaattccaatataaaatggggccagataaaatttcattaaatactttgcttaattctataattcctagttttttctgggatttatttgagctaaggaagtatttttaataaatggaattgcatttaagaaataatttaaattgaaaaaggtttttaaaagtcttcttttggctttgggccgaaagtcggcccaaaaccttctctctctcttcccggcccaagtcggcccagtccgcagccgcagccgcccgcgcgcgcgctcgctgtcgctgacaggtgggtcccacctgtcggagtcgtcgtcttcctcgcgtcggccgccgcccgaaaccctagcgccgcgccgccgccgtctccttccaaatccagccgctcctttcccgatccggtgaaatcaatagaggggaaacaatcttcgggatctcctctaccttttctcttatggaatcatcgtctaaatcgctttggaagttcgtggatttgaggtcgaatcggatcggtctctttcctctgaaccccgaggtttgcttcgcgtcgcgggtcgctgtgggccttcgccgccgcctccttgcccctataaaaggatccccggtgtcgccgctacccatcgccaccctcgccttcgtctctcgccgtcggaagagccctagcgccgtgtgacctagcaccgccatcgtcgttaagccggaggtcgccgccgcttcttcctcgacgccgtcgccgtccgttgatcttccgccgcttctttggtcaccggtgagttcgccatgatgcccgcatcgttttggtgtcctccgttcgcgccgctgtgccgtcgttcgccggcgagcttgcgcgcccgagccgccgagccgtcgccggagatgacgtcgccgctgacgtcatcagggtccgtctgccgtgagccgtcgtggaccgttggatctcggccgtccgttttggatggatcgatctcggccgtccgtttcccgtgaaccgccgccgtgcgcccggtccaccgcaaaccctagccgctgacgcaataattccctttttccttttcaaaaataattcattattgcgtcataattcaattaaaatcaatataagtgttttaatccgatttaatcttcaaaaattcataactaattcatcttagctcggatttagttggttcaagtctccaaatttttctaaaattgagatctacatgttaaaaatatccacatgtactgttcatgcttgtttatgtgctgttttggtgtttttgctcttttctgtttagattcccacgttccctgagagtccgttttcgcaggagaagaatttgaagagttccaaggccagcaaagcaagtcacacagatcccaaacaaccctttgagcatgttgatcccatttaaagctattgtttctattcaactattgcatttattttcgaatgtcattgggtggaattaacctattgtttgttatagcccttttgttcttgattactttattccttgataccttgggttattgtaacttgactagttgagctttacatattggttcagctagatattagatgtgattgcttagccatgcttagaaacattagcacactattgggataacttatgactcactattatttaatgattgcttaatgatagttcacgatggtcaatcgtgattggttaattaattacttgccaactaaaactggataatggtgggttgtgagcacatggttttgagagtcgtgctcatgacaattaaggaccggttcacgagtttcggttgtgaaacattaaccgtgccaaccacaagccagcgtgggcaacggctttaccttttgtatagcatggttcattgcggggcaccagactgagatgtggcggagataagcccacgggggtcgctggggagtccatgccttgtttataagggggtgattatcatccaggaatggtgcgctgcggtggattgtgttatgcaaggggtattgtcacagctcctttccgaggtaccgtggtggtattgaggcacatggtgacatgatgtggggctgtgtcttgtgggtacagtggtacacctctgatcagagtaaaactattcgaatagccgtgcccgcggttatgggcgggcctaacaatgtctttcgtgattagtctcacacttctcaccataataaaagatgctataattgctaataatttgattagctcctggtttggaatggtatattcctggtttggagatagaactgtgcagccgggatggttgttcagaatggttgggcctatgcaacagggtatgttgtatagcgttggattaatattgtttaattactacttaactgttttattaaattccgaaatgtttattaaatgctgtttatgcaaatgaaaccctactatgccatcctttgttatcctgtgcacttgcatatttgctgcgtggcttgctgagtatgtcatatactcaccttgcaatcattcatcagaggaagagttctacagtgaagctgatggtgtggaggattaggtgtagccttggttaagctgcctgtggagtggagtcgtctgcgccgtttatcttattttccgctgcttagatctttattgattgagaggaactatctacctctgtaatgatattttattcgcttattaattagagtaataattgtactctattatcaatttgttattgtgtgcctcggctgattcctggacgagggttcacacacatataagcgtttggaattttggatagaaattccgggcgtgacaagttggtatcagagccgccttgaccctaggttatgccaaatggttacccatagaagccctctaaaaatattggaaaagtagaactgttctcctccccttctcttttaattaaaccaaactaatggcacatgcacttcataatttcttttagtggttctcattcaaaatttattccagtgttattagtactgtacatctattacggtactaatggctcatttaccagcaaatgttttacaacattgttttatcttgctgcaatgaaataaatttagcatgttgattttataactttcttttatttcttttggaacctgttgttcaaaagtacaaaatttgtgagcttatttccaactgtttcaacttatcttgcaagcttggtttactttatttacttaccttttactttgattttctaaactttattcaaattaaaaaaaacttgtgctattaattggatagatgtcttaactccctcctttcacttgtctttagatgccgcgctacaagcctgagtacttgtttggagttgagggatttgtccagaagttgcgtacgatgtcctttgccataggatttgggactgcccctttttatgcccagattcctcatgatcgtcacgaagagaagtgccgagtcaaagtcaccttgaacagtaatagtgaagatatcccctcagtgatgttcgaagctggaggaagaaactacatccatgtatgtcaggaggtggcaaggatcgccataggagaactccgcgatcgctacagtgatcagttggccgacactgagtatcgctatcatcctcgccaaccacagggaagtgaccgtggcagctaccttgagactgaaggaattgagaatgatgctaccacaaagcatttggttgagatgctatgggctatggatgaaacccgtgcggagactgtgttagcggctcaagatcgtgaagaccggaatcgtggtaagatttgcaagctagaggataaaaagtggatcgtttggagaaggaactagccgcgttgaagggagaagcaccaccgcagaaggccaggattcgtcttaccgcaaggaagagagctctatttgtccctcgttaccaattggcgccaaaagtccgtgtggtggagaaagaagttaccccagccctagcagatcctccggtcgtcaatataagtgatgatgaaggagaagaatccaagcgcacccattccaagatcgagtggggagcaactcaagatgatgaagacgagccgaacgagccttcaatcaactccgatgcccggaagaactagaatgccttgtcaagccgttatcttagatcgttgtgttagcttgtttgtttaagtttggttgtgtgtgtctcgcatgtgatttacatcagtggtgggatgtaagtgcatgcgtttgtttgctttcgagtgttaggaagttggtgagtttagtggtgtgagagtcttcagttttgtaataatgaaactcagtcaagatcaataaaagttaaattaattctctgtcctaagtagttttcaccggtttcccttcttgtgccctgtccatgccagatggtgctcactcgcagcaacgggaatggccccaacaacaacaacaataataacaacaacaatggagagaatcccacacttgcccaagtcctggctcaacaggcccagcttatgaacatgatgatgcagcaactccagaaccagcagaaccagggaaataaccatgcacctccccagaacaagttagcagaatttcttcgtgtgaggccgcccactttctctagcaccactaatcctgttgaatctggtgattggttgcatgccatagagaagaagttggatttgcttcagtgcactgatcaggagaaggtctcatttgcatcacaccagctgcatggccctgcctctgaatggtgggatcacttccgccttaacaggactactgctgaacctatcacttggcttgaattcactgctgcttttcggaagacgcatataccatcgggagtggtgtctctcaagaagaaggaattcaggtcgctcacccagggatctcgctctgtcactgagtatctgcacgagttcaatcgtctggctcgttatgctccagaagatgtgcgcactgatgaagagcgccaggaaaagttcttggaaggacttaatgatgagctttcttacccactcatgactggggattatcatgatttccagaagttagtagataaggctattcgtcaggaggacaagtacaatcacatggagcaaaagaaacgccggattgctcaattcaagacacaacaggggaataatcagaggccgcgtcttactttaggaccccagtccatgccacagggaggttcttcgtctgttgttcgtccgcagcgtcagttcttcaacaacaacgcagtcaacaacatccgcaatcaagctccacgtcctgttgcagcctcgacacagcaacaacctgccaagagggagcaaggcagcaagcccgtggtgtgtttcaactgtggagacccaggacattacgctgacaagtgtccgaagtcccgacgcgtgaaggttgtccctgtccagagcaactctaccgtaccagcatcaaaggcccgtgtcaatcatgttgctgctgcagaagctcaagatgctccagatgtgattttgggtacgtttcttgttaacttggttcctgcaacagtgcttttcgattctggtgctacacattcattcttatctatgagttttgcgggaaatcatgggatggaagtagaagatcttagacgtcctttgatggttagtaccccaagtaatcaagcactctctttgcaacgaagcccctctgtcagaatagaaattcaaggcgtaccatttctggccaatcttatcctattagaatccaaagaccttgatgtcatcctagggatggactggttagccaaacataaaggtgtgatagactgtgccaacagaaaagtaactctcaccagcaatgatggtcgagttgtaactgttcatgcattgtcttctgagtctttaaggccaagtctgaaccaaataactttggaagagattcctatagtccgggagtatcctgatgtgttcccagatgatttacctggtatgcctcctaaaagggatatagagttcagaatagatttggtactaggaacaactccgatccataagagactttatagaatggcagccaatgagttggcagaagtcaagaggcaagtagacgatttgcttcagaaaggatacatcagaacgagttcatctccatggggagctccagttatttttgtggaaaagaaagatcatacccagaggatgtatgtggactatcgtgcactaaatgatgtgactatcaagaataagtacccgctacccagaattgatgatttgtttgatcagcttaaaggtgccactgttttctctaagatcgatcttcgatcagggtatcaccagttgaggatcaaagaggaagacatacctaagacagcttttaccactaggtatgagttgtttgaatgtactgttatgtcttttggacttaccaatgcccccgctttcttcatgaacctaatgaataaggtgtttatggaatacctagacaagtttgtagtagtctttattgatgatattcttgtctactcccgaaccagagaagagcatgaagaacatcttcgccttgcattagagaagctacgagaacatcaactgtatgctaagtttagcaagtgtgaattttggttgtctgaagtgaagttccttggtcacatcatctcagctggaggagttgccgttgatcctagtaatgtagaatccgtaaccaactggaaacaaccaaagacagtttcagagattcgcagtttcctaggcctcgcaggatattatcggaggtttatagagaatttttccaagattgctaagcccatgacacggctgcttcagaaggatgtaaagtacaagtggtcagaagaatgtgagcagagttttcaagagttgaagaatcgcttaatatcagctcctattttgattttgcctgatccaaagaagggtttccaagtgtattgcgatgcatccaaacttgggttaggttgtgttctgatgcaagatgggaaggtggttgcctatgcatctcgtcagttacgtccgcatgagaagaactaccctactcatgatcttgagttagctgcagtagttcatgcgttgaaaatttggcgtcattatcttttcggtactcgtacagaggtgtataccgatcacaagagtttaaaatatatctttactcagccggatctgaacatgagacaacggagatggttggaattaattaaggattatgacatgggaattcattatcacccgggaaaggctaatgttgtagcagacgctcttagcaggaaaggctattgcaatgctacggaaggacgacagttgccattggagttatgcaaggaatttgaaagattaaatttgggaattgtcagtagaggttttgttgcagccttagaagcgaagcccactctaattgatcaagttagagaagcccaaattaatgatcctaatattcaagaaatcaagaagaatatgagaagaggaaaagctatcggtttcatggaggatgagcaaggaactgtatggttgggtgagagaatctgtgtccccgacaacaaagatttaaaagatgcaattctgaaagaagctcatgatactttatactccattcaccctggtactaccaaaatgtaccaggatctcaaggaaagattttggtgggcaagtatgaagcgtgaaatcgcagaatacatagcagtatgtgatgtttgtcagcgagtcaaggcagaacatcagaaacccgcaggtttgctgcagcctttgaagattcctgaatggaagtgggaggaaatcggtatggatttcatcactggtctacccagaacgtcatcgagccatgactctatttgggtgatagtcgacagacttaccaaagtggctcatttcatcccagtaaagacaacatattctggaagtcggttggcggaattgtatatggcaaggattgtgtgtttgcacggcgtccctaagaaaatagtgtctgatcgaggcagtcagtttacttcaaatttttggaagaagcttcaagaagagatgggttctaagctgaactttagtactgcttatcatccgcagacagacggacaaaccgaaagggtaaatcagattttggaagacatgttgagagcttgtgctttagatttcggtggaagttgggataaaaatctaccttatgcagaattttcgtacaacaacagttatcaagctagtcttcagatggctccttacgaagcactgtatggtcggaagtgccgcactccgcttttgtgggatcaaacgggagaacgtcaggttttcgggacggatatcctgagggaagcagaagaaaaggtgaaaatcattcaagaaagattgcgtgtggcccagtctcgtcataagagttatgccgacaatcgtcgtagagatctaagttttgacgaaggagattatgtgtaccttcgtgtcaagccttttcgaggagttcatcgttttcacaccaaaggaaaattggcaccgcgttttgtgggaccttataagattgtcagtagaagaggagaggttgcttatcaattggagttacctcaatctttggcaggagtccataatgtgttccatgtgtcgcaattgaaaaagtgtttaagggtacctaccgaagaagctaatcttgaacagatagaagtccaagaggatctgacctatgttgagaaaccaatccgtatcttggaaatagatgagagaagaaccaggaatcgagttatccacttttgcaaagtccaatggagtaatcactcggaagaagaatcaacttgggaacgagaagacgaattgaagtcagctcatccgcatctgttcgccagttcttccgaatctcgaggacgagattctgtttaagggggtaggtttgtcacaccctaaaaatcctaaatatataaattgttgtttaattggaatttttagaaatgatttttaaaagccttgaagagaagatctaattttaattaataaattccaatataaaatggggccagataaaatttcattaaatactttgcttaattctataattcctagatttttctgggatttatttgagctaaggaagtatttttaataaatagaattgcatttaagaaataatttaaattgaaaaaggtttttaaaagtcttcttttggctttgggccgaaagtcggcccaaaaccttctctctctcttcccggcccaagtcggcccagtccgcagccgcagccgcccgcgcgcgcgctcgctgtcgctgacaggtgggtcccacctgtcggagtcgtcgtcttcctcgcgtcggccgccgcccgaaaccctagcgccgcgccgccgccatctccttccaaatccggccgctcctttcccgatccggtgaaatcaatagaggggaaacaatcttcgggatctcctctaccttttctcttatggaatcatcgtctaaatcgctttggaagttcgtggattcgaggtcgaatcggatcggtctctttcctctgaaccccgaggtttccttcgcgtcgcgggtcgctgtgggccttcgccgccgcctccttgcccctataaaaggatccccggtgtcgccgctacccgtcgccaccctcgccttcgtctctcgccgtcggaagagccctagcgccgtgtgacctagcaccgccgtcgtcgttaagccggaggtcgccgccgcttcttcctcgacgccatcgccgtccgttgatcttccgccgcttctttggtcaccggtgagttcgccgcgatgcccgcatcgttttggtgtcctccgttcgcgccggtgtgccgtcgttcgccggcgagcttgtgcgcccgagccgccgagccgtcgccggagatgacgtcgccgctgacgtcatcagggtccgtctgccgttagccgtcgtggaccgttcgatctcggccgtccgttttggatggatcgatctcggccgtccgtttcccgtgaaccgccgccgtgcgcccggtccaccgcaaaccctagccgctgacgcaataattccctttttccttttcaaaaataattcattattgcgtcataattcaattaaaatcaatataagtgttttaatccgatttaatcttcaaaaattcataactaattcatcttagctcggatttagttggttcaagtctctaaatttttctaaaattgagatctacatgttaaaaatatccacatgtactgttcacgcttgtttatgtgctgttttggtgtttttgctcttttctgtttagattccgacgttcccggagagtccgttttcgcaggagaagaatttgaagagttccaaggccagcaaggcaagtcacacagatcccaaacaaccctttgagcatgttgatcctgtttaaagctattatttctattcaactattgcatttattttcgaatgtcattgggtggaattaacctattgtttgttatagcccttttgttcttgattactttattccttgataccttgggttattataacttgactagttgagctttacatattggttcagctagatattagatgtgattgcttagccatgcttagaaacattagcacactattgggataacttatgactcactattatttaatgattgcttaatgatagttcacgatggtcaatcgtgattggttaattaattacttgccaactaaaactggataatggtgggttgtgagcacatggttttgagagtcgtgctcatgacaattaaggaccggttcacgagtttcggttgtgaaacattaaccgtgccaaccacaagccagcgtgggcaacggctttaccttttgtatagcatggttcattgcggagcaccagactgagatgtggcggagataagcccacgggggtcgctggggagtccatgccttgtttataagggggtgattatcatccaggaatggtgcgctgcggtggattgtgttatgcaaggggtattgtcatagctcctttccgaggtaccgtggtggtattgaggcacatggtgacatgatgtggggctgtgtcttgtgggtacagtggtacacctctgatcagagtaaaactattcgaatagccatgcccgcggttatgggcgggcctaacaatgtctttcgtgattagtctcacacttctcaccataataaaagatgctataattggtaataatttgattagctcctggtttggaatggtatattcctggtttggagatagaactgttcagccaggatggttgttaagaatggttgggcctatgcaacagggtatgttgtatagcgttggattaatattgtttaattattacttaactgttttattaaattctgaaatgtttatgaaatgttgtttatgcaaatgaaaccctactatgccatcctttgttatcctgtgcacttgcatatttgctgcgtggcttgctgagtatgtcatatactcaccttgcaatcattcatcagaggaagagttctacagtgaagctgatggtgtggaggattaggtgtagccttggtcaagctgcctgtggagtggagtcgtctgcgccgtttatcttattttccactgcttagatctttattgattgagaggaactatctacctctgtaatgacattttattcgcttattaattagagtaataattgtactctattatcaatttgttattgtgtgcctcggctgattcctggacgagggttcacacacatgtaagcgtttggaattttggatagaaattccgggcgtgacattgttgtacaggattcttagcaatgttaatagcactagtattatcccaaaagtgtggtattttctcaaaaggaagaccaaaatcattcaaatttgaaattagccaaataatctgagaacaacaactagcagtagcaacatattttgattcagcatcaacagatccgaaccccgacgaccctggccggtctaaccacacgtcctacaccggtgtaaccggaggtgtgccggcggtctggccggcctggcgcccggtctgaccagctgagccgacctcgtcgtcgtcgtcgtcgctctcgtcttcaaaaatacgaccatcctccccctgaacctgtgacaatgtacctgcaatatatggtctagtacttggactagcctcatcaaaagtaacttcgcaagtctcaataattttgttagtctccaaaacaagtacacgatagccacgtgaatgtgcgaggtaaccaagaaacattccatcaatagagcatgcctcaaacttatccaaatttccatatttcaagacaaagcatttgcaaccaaaaacacgcaaatatcaaactttgggttcatgtcaaaattgaagcttacaagaagtttttccaagttttgacctcaagaaaaccagatttgaaatatagcatgcagtgttaaccgctttagcccaaaattttctaggagtgtgatactcatccaacatcgttctagccatctcaaccaaagaccgattctttctttcaacaacaccgttttgttgaggaacacaaggagaaacaaattcatgttcaagacctttttcgttgcaaaattgttcaaagcaagcattcttaaactcaccaccattatcacttcgaattcttttcaaagaaccaagaagttcaagatccaatcgaagatacaaaccacgaaagtgttgaaacgcctcatcctttgttgccataaacaatacccaagaatatcgagaaaaatcgtcaacaataaccaacacatgccactttcctccaacggattgcactctagctggaccaacagtgtccatgtgtaatagctgtctcggtgcatctgtcatcccagaaacaatacgagcatgtgaagaagcaatcatcttagcatgacaatatggtgtacaaaccaaatcaagatctttcttaagtttagtcaaaccacgaacaagatccaaaccacttaacctcgtgagatgatcaaaaccaacatatccaagtccacaatgccaaaacattacatccttattaaatttagcaaccaaacatgttattacaagtgaaacatgattttcaaaatcagctttaaatactcttccatagcgagaaatattcaacacagaatcaccacaagaatcaaatactttacttccagttttcttaaagtgaacctcaaaattttcatcaacaatttgtgaaattaaaagcaaattatactttaggtcctcaaccaaagctacgtttttcaattcaaacttgtcacttaccttgaccatacctgtagcaagaacggcactagtataagcatcaccaaagataatcgattcagtcttggatgcctgtttgaggaaggagaaccaatttttatcaccggtcatgtgccatgaacaaccggaatccacaatccacatgttgtcctttcttgccagcaaagcctacacacaagaagatgtcgaagcctcagtactagggttagataaaagaaatttaggaatccagtaccaagacacatgaccagtagatccaataggcatatatcgacatgcaaaaacaatttgagaatttttagaaaattcgctccgaggccggtctgaccgagatacagtagggtctgaccgggggccggtctgactgcttctgtaccgccggtttgaccggagtccggtctgactacggcactgctgccaatctgacatgaccggtctgaccgtcggacccattgcggtctaaccggtttcgtcgagggaaaaccagatttttgccactttgattttgcaaaagcaatttctctctcctttttctatttacgagctaatttgaaacaaaaaccaacaagatgacaatctttaccacaaaaagaacaagtatacatttctttagaagtagatggttttgaaagatttatttttgtttcttttagtgttgcagaaagagagggcataattccagcagacttaaaaactgttttcttagcactaggttttgacaaaatttcaccatgttcagtcacactcaaaacattaccttgacttttggtgaaatagacatgaacatcaaaaccaacaccatattgtaactagtcactttagattgatacaaaatcatgttaagttgtttcttaccatcagaaaatctttgcaaagaacttttcaaataagaaacctatttttttcaaattagcacaattttcacaatctatcataacacctttgcttttacaacatttggggcaagaaagcacttcattagttttcacaacatcctccatgtactcaacacgacctaatgcatcttttagcctcaacttgtttagtgtgcatgttgagcaattcaaaacaccatgttgttctttttaactttttagcacaaatcatgttaaacatcacactagcatgaaaagcaacttgatattttttttcaacaactttttagttaaaaacaactcatccaaagtgcgtgtgtgcaaggcaaatccaagagaaagagaagatctatttttcaaatcatgtgcaacattgacatctctaatttttgaaatttcatgcattaaaacctcgcaatttttacaatcatcatcattaggaataagagattttaatcttgtaatttcagaattaagagattcaattataaactcttgtttcttatgcatcttctcaaatttcttactttttgcacttaaaacatgaatagctttcagattctgaatccgattcaccacatgccatgaagcaaacactggcatgttctttcccttgtcttcatcttcctcactctctccatctacattgcttatacttgattcaaaagcggcgtagacttgattcaacatcttcttgagattttcttggtcttcctccccttgaatgagctcttggacttggtcttctcaccactattgtcttccttcttgcctctcccaagattaggacaatgcgagcaaatatgatgaagcgctccacactcgaagcaatgagttggacctcctcttttcctataactaacattattcatagctcgagaaatcttgtaagcggccaaagccaagtcctcctcctcgaactgttcgagttgctcatcaggcatggcattaatcaaagcaagagaggtagaattatgtcagggttacggataaggcataccttctatcctacgacttataaaatacatcgataaggtatatcttcacgtacacgaatcgtttccatgtacactatttggagtttgttctaaattatggaaaatatgtctacaggtcaagagatttccaaagtcctactcggaagagatagagcttctgttataccgtaccagatcaaatatcctcaggccttacttaggggtcaagatgatccacggtataaaaggaccgctagggaggggtgcaaggcttttggtatttcttaacgacattactagaaatataattcctagcaatggagcagaaatactcctggtatattatggttatagagttcatccgtaagcgcacggatataccattgtagcatttcacccgagagtattccaagggtatcgtatttatttaatcccatgggaagatcatggtagagagaacctaactaataatttatatgttacttgtaataatcatagtctaagcaggggttaatataatccaagggtagagtgacacacaagcagggagctactcattcttttataaaatatctaagctaagtggaaagaaaagagaaagagaatctattcctatacttctagtatacatactatatatacatcctaattatctgatatactagctaataccctctatccaatgccctcctggtacttcgaaaagccacccctgactgccgagttccttacgacagtccgtcatgaccatacaactggggctaaatacagaggagtaccctcggaaggaaattaacttaggactataaacacgcgcggaggaatacccgtactgagctgtcaccatcagcggcccacctctcatccgcagcatataaccccaaataatgatatcccgtaacctagacaccatgcctaaactaccagatactactctaatatcatcgtcatgacatagagtaattgcataagcaaacactatacccgtaccaaagcatctcccatataagctagcagtataatcagtataacatgaacataatgtaaagttggcattcatatactcggaaagtatttcaatactataaatgtataaagaagagtattctaaataaggtacaaagcatacaaaagaggaaaggaaagctactagagccatacccgaactcatccgaaggcttccagactccgatttctactctattcatattccactagcttaagactactaaactaacttgagagaatatatatgagagagctcttgcttgaggtgtgtgttgaagtgaagagagtgagctccttttataggcaggtaatgatggttatgacggttggaatggtcggtaataccctccaaccatcctaggggcatcatctcagccgtctagccaaaacctggatctaacggtggcctggtgggttcggcctagtttggccgaaccaggggccggcccatccagcccacaatttggctggtggcctcctctactgctcctctccgcagacttgtgaattttggcctaattcgttgtgttaattctgagttcttggcccatcaatctcatataaactggactagggttattacctgacaaggggcctgaaccagtataatccttgtcttttgtctgcttgatgtcgtactacgtagacccttgttccaacgtatcccaatactcaactcatccagtccacgagtatcactcgtcgacaaattcgacgatgaagcaccaacatccaaagaagtcgagggagaaaccaaagcactagaattagaatcaactttacgagaaagaatatttatctgatgtgttttcaattttgtataaagtgaatccaaagtcaaagtttgactcttgaattgatgtgactttcaactcccaaatagacatgtcaagaccattcaaaaagtggcgagaaatctcagattgtgagtaattaacatcataagcagaatcaacatatctaagatcacacaaaattttgttaaatctagaaagataataatcgaaatcttctccggatttagaaagattagatcatccggtctaaccgccccgaagaagctgtagtcgcctgaagtcttcaccgtactgcccgccatgtagccgccggtctgaccgccgcgatgccgccggtctgaccgccggtgtctcgttggttagaccgtcgaacccgagcaaacacaaatcgaagaactcttgatggagatgacaactttattacttctctctgtgtttacaaagtgcaacaacaacactcctcacgaaaatctcgactaaactcgaaaccctaactattctctcaactcaatgctctctaaagcgataccgggaggccacatcctccctctctatttatacatgaggtaggcagcctaaagccacgaaccaaactcatacaagaagtcctaatttacctaggaaaccttcccgtacaagtgttaacgataaaatttggactccttccaaattcgactccgcatccgatacacacacaatatctccatcgtatgccatatggaatcttcaccaaccacgtgcattgatctttagcctaagtatcccgcatgatatctaaccatccggacgtcaccttatctccaagttgactcccgatccatcaccggcaatactctcccgaggcatcaagtcactacacatgaatcaaacaaagaaaccatattccgagaccaagttatctccaacttgactcattgttagcaaacaacagtattacatacgcagagtatccatctagaagccataaacacatattaattatggatatccaaagaaacaacctgaaaccgaaatcgacatagaatcggccggtctgaccgctcaatacacgccagtctgaccagcagcacctgcctagtctgaccggacttgacaaaacaaccgtccctgttcatcacctaaaaatccaatcatctccaaaaccacttcgccaataatctctaaatatcaaaatcaataatctcatatgccagttgttcatcacataataagaataaaaaacactttaatcttacacctcccattacctctgttcgtaatgagtttatgctctgctaattttttatctattggggggataaatacctgttctggacaatggttgcatggttaaggtgggatgcaaccatttttattttgactgatcctacactaattggttagaatcatgtatataaaacaaattttgaattatgttagttctttctccattcactattctgttaactgcaaacttaacaaattcatttttgtttaatgacgttatatgttacttttttttgttttgtcagcaagcatctatttactaacaatatttgcatacaaattacaaataataagtttcctaaaggtcactgtttagaaaaaaaaatggaatcttgaagatatgtaatctgaaggttcttaagatatgtaatctgcatatgaatattacaacactgaaacaaattactactgacgagtcatatgttttgtcagttgctaacatttgtattttgtcaacaataagactgcatcacctcataattttagggaatattacatagttgtgtcagttttgtctgaagaagttatgccatgtcagcttgtgtacactctctcggttttgtttttttttgtattttttattttgtgtttgtttttgtcaaaaaattttactttgtcagaaatgagcatagtttcagaaacggtgcttttttgttttttatgtgtttttgtttttgtttttgtctttgttagatttttataattttggtacatattaattaatttatcgcttatttaggtcatagcctaaccactggaaatcgttcttaatgctgctgtttgcttgtcataaaaatccctcaattctatgtccatgtttttgtcggagacagtcttttatcaaataatacttataagatgtatatgtttttgtctttgttagatttttataatttggtacatattaatcactttatcgcttatttaggtcatagcctaatcactggaaattgttcttgatgccgttgtttgcttgccataaaaatctctcaattctaacgtccatgtttttgttagaaatagtcttatatcaaataatacttatatgatgcatatttataagtatcaaaactaaaaaaaaaaatttatatttgaagagaaactaaagatcaaaagttttttaacttcatatatgcatatgttttagtttaactagttttgatggcatttatattgttctgttttagtttaacccgtgttatgcaaaaactctattctttccttcctaaatgaaatcggcagagctcctgcccttacccctcgaaaaatagtgttctcatttgtgggcttcaagtgattggcatatataccatgtctccaggatgttgaaaaggtaaatctctaatgtccttcctagtttggtttgcagaattaatacactttattaggtacagaaattccgtaatgtttgactttatttttggtagtctgtttgctctgtgatactggacggccggtagagatcattatattgtcttgtcaggtgtcacaagtgtgcctacgctgtgaggtcaatatgggagagtatttatgcgatgtacgcaaattttatgacgatgatgtcggttctttcttggttgcgaattgggccttcttctgcttggtttgttagaacaattcatcacaaattttgggcttcatttgaatggataaaaaccagcccaacaaactaacaaaaaggaggccttcttgtaacgtgcaccgtcttaatagagaagcactggcgtgggaggcgcgcacggagaagagcttgcgcgggggcaacaccgcgatctttgacacgtggtttatcctatggccagaaattctgctgataacccaaaaattttcagccggataccacatagacagtgccatttttttataggttcgagccattctgaagcaataactctacgtcacatcggccaggtggctaattttttaatcgatatatagagaacatgagtaaaaaggggtatgcgcctaccttcacatcttaaaaatggcaaaaggtcaaatgcctcgacctgagctgtgctaaataagccccgtaatacaaattcacgaaaaccagactaaacgaagtgaaaatcactgccaacccggagaagctaattgatattctctccttttttaatatatttaagatacgtttgatcattcgcttattcaaaaaaattatgtaattattatttatattattatgacttgatttatcgttacatgtttttaagcatgacttaaaaattttaatatttgcaaaaaaaaattgaataagacgaatggtcaaatatttgtcaaaaaagttaacgacgtcatatattaaaaaatagaaagtattacaaaccatgctacgtaggacttaaaaatataagcaacacgcgttacttagacaggactgaatctgattacataatacaagctcttcaaaacatgccacaacagtaatagtactatccgtgatgcttatcttgtgcaaacaagacaatgtcgtgattcctgtcttagaattcttccagctatggggacaatcaagctaatattctctcaatatttttccctgtataatgagttttaatagcaagaatcagtaaaagatactaagcaagcattaacgaaaatatgagatcaaataacaaggtgttatgcagaagggcaatttcactttaaaactttataatactcactcaagaactcaagatagtggttcaatcgatcacaaactctaggagaaaaagggcaagagagaggagttgtcccctacagtcagatcattactactacctccgtaccaggttatatgactttctaacattgcccacattcatatatatatatatatatatatatatatatatatatatatatatatgaattcattaacaaatatatgaatgtgggcaatgctaaaaagtcctataatataaaacggaggaagtaaatttaattttctctagatcttaatattttgaataatgtttcgtttgcccattgatttgctccagcatggaagtaatttatactagaacatgtatctgggcctatctatcacagctcacttggctggccccaaagaagcactctgcttcttcccctgttccccaaaacaggggtaaagctctgctatgcttatgtccgtctcactgcttggttataccttcttgccaccttcccattggataatttggcgtggccttccgcatggtggtcaaagatatggctcctactcactccgtccaaaaaaaacccaatccaatccaggtttatatttaggattagtttttttatggagagagtaggtgacatgacaagtaatttagagattatattcgtatggagaaataataagttgctcttgcttactaatataatgctggatggaagaaatcagtggttagtttaaccataaaatgatagcatgcatgccaatcgaatagcattccggcacctgtattttgtacattaaacttttttagtttaatggtatatgtctgatgttggaccctcaagcatgtatgtttgtgtatatgcatctgtgcgatcccaggtatttgacaatatcacaataatttgtataaattatttaactatctatttaacttagccccttaatttctattataagaagtgattaaaatgcaggttgtttcaggacagtcctaaacatagtcatcgataaatcattaaaacagtgcctttaggtgatccataaaacagcagcattaatattcaagcaaaggaaagtactataaggatatcacgagtaccttgcagcgctatttcggagtccttgcacttccatcatgggtattaaacgtgacatgtatgtcttgaatccttggatgcctttggacagcgtccctgtatgcagacaccttgctggagttggctgtcacttcaacctcttcaagctttagtaggtgctcgatgccaacaagtggactactgccatattgtgctgccgctgctccactgctggagctgcacccttgttcgagctgagcaggcctcctgtcatctagcttcagagtctgaagctgtggcattgcccctatacaaaacttcaggcatggcaaaaaatcacatgctagaataaatttctctagttttggaaatctgtgggtataaatctcgatgtcgtcctcaggggttgcttgcgcagtcaagtcaagatcgatgaggcagggcagattggatagaacatggacgccggtgctctggagctgcttgacacgaatctctaacattgtgagcttgtcgcactgctccatccactccgggacagtgtggatgcttttccggatgatgagtctgtgcaccatccagaatgcccggcgaataatcacccagataggtggagcagaagttctcaaacgagttatcacctttgaactgtagggctgcccggatgacacgtgccgacatcttaattctatcaatgatgtcacgtcgttcctgatcaagcacaaacttaggcttgtctagcttggttaatatcggttcatcgtcaccaggcctcacgctgacagtatctcgaaaatgcatcgtgctgacatcatcaccagcccccacgctgacagtatcttgaaaatgcatcgtgccgacatcaaaggtaaacagagtctgtagagagaccagtttgccaatccaattaggcagctgtaaaacgtccgaaactgtgagatggcgcagcgatgatagagaaataacatctgatggaataccagtcaccaaaaggctgcatagtagatctagcgtcctcaaacactggagtctcccaattttctgaggcattatcaactggaaccctctgatcctcaagtgtttcaacaggaagagattacttacagcagacaaatcaaggagcgtaggtgccacataggccacaagtttcaatacccgcaaatgttcaaactttgaaataggaggctgtgtactgcagccacgcaccgggaaagtaatgaaggacctaacttgtgatacttccatcctttccatctccaaattttcataggacaactgacagcataaccgacgaactggaaaccctctatcattcaatatggactgcttagttgccacagtgatgaagttttcctgctggcacttcgataaaataatatcaagcataaggtcatggactcgacatgatacaacctcaccgagacgattattatttggttcaatcaaactcctgttaataagttcgttaaaatagctgtcagcagcttcctccagatctaaaccagctttttcctcaacaaatccttcagctatccatagtcttgttaaatcaaccttgaaaattttagagtcctccggatatattccaaggtacaagaagcatgcccgaagatcatgtgggacatcactataactcagattcagtacatgtctcatccattctagagtaggatttgtttccaactcgtagcccagatagttctgtactttctcccacctttccacattcatgccatgactagccaaaaggctagcaatgctaatgattgctaatggcacccctttgcattttcttaacatgtcttctgatatttttctatattattgctcagtaaaaccatcctcggaagcaaatagccttttgaaaaataacgatcgtgagttaacctcatcaagtggttgcatcttgtacaccataccatagaaatcaaagctgcactttgtagctacatcttcgattcgtgttgtaattataactcggctaccataattattctgaacaaaagcacactggatattgttccatatcttggtgctccatatgtcatcaattacaataagatacctacaaatagattctttttgtcatgatcttttgggcactcaagtttgttcgattggaagtttggaacatctattaattggccatgcatccaatggttgacgttcctattgccctattagtggtaagacaacacactataacttaaaacaaatactccgtttttccaaattatataaaagttttattctttgaaactagtactatggagagaggtaaaaatacttggttgcctccttaggatagttggactattggagactataataaagccaaaaggtaataggagatagtttagtggtaaaagtcaccttttacaagtactaggatattatatttggggcatagtttgaactctaaaagttgttatatttggacgaatatagtttagtggtaaaagtcaccttttacaagtactaggatactatatttggggcatagtttgaactctaaaagttgttatatttggacggatgaagtagaatatttgcatgtgccttaaaagtctctttttgataaggcaggtataattaataaaatgatctcaaactatattttataattttacaaaaccaaattatggcctacaaaacttatatttacataaaatgtgacattcattatatttgaatcatacttagataataaatcaaaatcctgctagtgaattttcagtggtacctctatttaatttaggttcgcatgtgaacatttgggacccaactgaatcagtcacccgatttgtttgagaaaaatatggcgccctttcccaacatgcatgccacattttttagtgcagcacctccacatgcatgcctcatttctctcttccactcttcctacgtgcatgcaagctctccccaccactccctctcatcctattcacttaattagcaagttgaaaattgtttttctcacaaattactcttacagttcgtgatctgattacaccgttaatttcatcataattaaatatttacaaggatatatcacctgattatattttcctcactacttttatttattatttgtatgatgcacatattttttaaattaggaaaaaccataatcaattaatggcttggatttagttagagctcttaattgcagttccttagttactagaggctcagaataccttaaaattccgcagctagattaacatatgcagtggttagtggccatatatagttttttttcctaataaaactagagaaatcatgttttaaaatgtggcctgaatataatgtagaaagtaaaaatagagaaattgagaaataaattcataatcaataataaagcatcaaaggagaatagttagtcattttagtccatatttataagccaaacacagcaatgtataccataaaatttgctagcatttgccaaaagttcgtgtctaatttgtctaaggtttagctactaaattacgtagagttgaaatttgctagcaaaataaagttgtgccaaattatactgagatgtgtgtgacatgtccgatatgattgtggaacctcccagtgtgctatgaagtaaacatgcacctaacatagagcctaatttgagctatgtcaacctaagacaacattctaatacgagagaaaatatgtagtgcaaatcagaaaactattgtaggatctaaaaatagaagtttgagatttgtccacgtcatcttttacttatggtgatttggacaaatctcaaacatctatttttagatcctacgatagtttcctggtttgcactacatgtttttccttgataggatcgaaagttccaaatggtgctaaaatctaatacaagtcaacctaaacagtagaaatgtacacatagttataaagtattagctatacacaagaaatattcacacgaactgaatatgaacgtcacatcaaagacaaactatatacagacttaggcatacctcttgttagcaaggtgttctctgagagtgtcaatgagcttttgattatcatctggaaattttgtgaactccgagggtgtcaatgagctcttgattataatctcttttttttgaacttctaaaagtagatttttcagaagcttcaacacgtcgggatttttggacactgacaagaatgatgtgcaattaaacttgtccttcacttgcttgtacacttggttagcaagagttgtcttgccaaggcctccaaagccaacgatagatacaactttgagttgttgggttggaccactctgtccttcttccgtgagccaccgggaaatttcttcccgtggaccatcaatgcctacaagatttttagccgcttcatacagcgcaggcagccgaggatcgatttccaccaccttaggacaagaggtcgtagcctcacctagaccgatatacctgctacggcgttgagccacctccatgacacgggccttgagttcttggatcttgtttgcgatctgataccgaacgcgcagcttcctgatctttcgtgcagtcttctggagcaacccatccttgttatggccatcaccaagatgatacatgaacacatcaatgcagtcctcaatgtcatacgccatctcgcggacattgtccctccacagcttctgctggccatccagccgctccatatctgcaagcttctccagcacaacattcatttcggccaactaagacctgaggaactcgatgtccttgcgcactcccttgagtttgtagcacttgtcaccgagcagcgtggctagcttggtgaggagaggcgccatcacccccatggaagcgctcaccgcctccatctgaagcagcatgcatcatgaccatattaccggagtaatttattggtttggggtgaaattgatctcaaaagaaaaacgagaataataacaaaatgaaaaaaaaggtaggcgaagaaacgcactggggagataggtaggcgttcgtcgagaggaaaacgacgggtcgaggtaccggccggctgccgtcgtcgccgccgccaaatcgcacccgacccgagcaacccgggccactggccggccggtggcttcggctagcgccgcgggccagatcccgccccgcgcctgcccgagctctcgccgctccggccgcccgcggcgctcggcgtctgcagcctcagccgcagcggagctcagttgctagtgctgccacctgggacgatcgacattgcgatagggaagtaatcgagagactgttggatagggaagcagtgcgaggagataagagcaatggggggtatagatggccatgcggaggcccggcacggcacggcccaggcccggtcgtgcctgggccgaggcttgtcgggccggcacggcccgaccgacgcaccgggccgtgccgtgccagcccacgtgccgcactcacggcccaacacgcctcgggccgtgccgggccggaccgaaggcacgatgggccgtcgtgctttcttcagaataagtctaaatttactccctcctattgggctgtgacatatgtatagctacaaaaagtctattttacctccctcttctttggactgtggtatataaatagctaaaataagtctatttaaggtccctattatttagacagtgacatttatatgtctatttttagtccctgtactttgtgtaccgggcttagcctgccggcccatcgtgccgggccagcccgaccgtgccgggccagcctagcgtgctggtgaggaggcccaggcacggcccgacgatcgggccgggccggcacgggcccgacccaagtcgggccgtgccgtgcttgggccgggccaaaaaggcgtgccatgggccgggccttcgggcctcgggccttatggccaactataatggcggggggtgctcctagcgcgatttagctaggccccctttcggtgtttttttttccgctctttctctttatttttatttgtatttcttcctgattttggcgtggcgtttttttttccgctgtttctttcctattttttttccttttgcacacctctttacaaatatagaattgaaagtttttaattttgacttgaaagatttcaaattttgactttgaaagttttcaaaatttgtgttgaaagttttcaaatctgggttgaaagttttcaaatctgggttgaaattttttaaatttgggttaaaagttttaaatttgagttgaaagtttttcaaatttcagatgaaaagttgaaatttttcaaactttgactttaaaaaaatcaaatttcgagttgaaagtttttaaatcttgattgaaagttttcaaatttaggttaaaagttttcaaatctgggtcgaaaattttcagaatttgacttcatgtataaatttcttttcaatcggttacttaaaaaagaatctttgaaaaaaaacaaatcttatcttaattattttcattatgtaaaactaatgaatttttttatgcactaaaaccaaaggaattagagctaaatggaaaaaaatccaaaaaaaaagaacagcgccgacgcgcgtacgcgtgggccggtgggccggagtgcacgccgcaggcgcgtatgcgcgaattagctcctccgagcaatgggtgcccctacacaatacccctagcgcacgccgtccatctccgtttactttttcactcgagccgtcccctggcgatgccgcgcgcacccttgctagggacgtggccctacctcacttttgacagaggcacggagcagagcaccgcgttgggcgcatggtggctcgtggacaccacactcacctccggattttcaccttccacccctcgtccagcagatccgaccgcccttgctcatgcagctccaacgccatcgctagggaatagtcgtcgtcgccgccgccgccgtcacccgagtacgacaacgcctcgccggtgctgccctcgcctcgacgccaccacgccagcccactagatccgcccgcccgtgtggtgagcatgacgacggcgtccgagaggacgtgctatccgcgaaggatggagaggaagcgggaatagatggccgctcggaagggcggccgatccgcccacgacggcgccggatatgccgccttcggccgccgtaggtgccggaaccacatcgaccggaggtcagctactgcggcgggacgtggctggcggagggaggagggaggcagcaacggctgttggagagggcgacaagggaggcggtggcaggaaccgtcggcggcaccctgttggcaaattttttgcaagaagacaattacgatcgcaacacctaaacgccttgtggtgatatggagtcgccaaccacctcaaccaagcaaaaagctaaaccaagatatgttttgatagattaaaccggctagcggagccgatttagatagaacgatggataactacccatctcgtgggcaaacagaaggtttacgggacaaacctacaaagatttcgcactctcgcagcgaaggcgggtgatttacggtgcaaatcgacatagatggacgaactaaagtagaactagatgaaaaagtagaagtaatattgaaaaaagcgattcgattgattgtatgttggattgtattttacaattgaatcggccttgtacctatataggggttggtcttgccctctacaggccctcttccatgtccaactaggggtagaaaccaaaagaaacccgaacacatagcctcccaagtaaggaatctcgagactcgacgaaaacagtctgtctcggactttgcaggtctgaccggccacataccgctggtctgaccggccctcaagccacgttctgaccggcccatacacggcggtcagaccggccctgtggaggaaaccgacatatttcccaaatcttggcaattttgcctatttcgaccctaggtgtaaaaattgggtgtaaacacaacccttacactcgacgcgatcacgagcagagagaggagcgggcgaatgagaaagaagaggaggggtacgtacggtattttttttctctggactaccttgggtcaggacacccattatgggctgacgtatctccatcaagtggcctcagattttgaagaacctatgcagaggtatcctccattggaagatgagttcctcatagagcgtcctaagttagtgagggtacattaggggtggctttggttgtagataccctaaacatagcgcattggaatttgtcaattggcaaaaagaaagatacacataatcttgctttgaaaagatatacttgttcacatgcccaccctgacatcaactaatcaacgatcattacactcgtccttcctttacacttcatgcaacctttggtgatttatatcttttaaaccgtatatacgatcattttaaaccattatactccactcaaaatatataataaaataagtctaatattgattatattaaaattacttaaaccatagaagtaaccaggttctacaataaaagtaactttttgtgtagcattgaaagtaaacatattgaatgatattggaataagaaactatgtaaagtaaaatatagagaagactcaaaaactaaatacaaagtaattatgcagctatactttacatagtttggagaaagtaattttcttcatttgaaagtaatcactacaattttttttggaaatggtaatttagcgtcatatatagaaagtactctttatgtattcaaagtaactacacagttaggagaaagctagtaaacttaaaaaataaatacaataaaagtattttatggtatctactctataattcaccaacacagtcctacattcttcatacttcattcatcaaatccaactatctgtgttcatctggatcagatcaacagggcagattgcctctctatccctcaccgtgttccactcccccactctgatccggcttccccgtccggaaaccgcaatcttcgcgcaatctcctatgctctccctcgtcttcgcgagattcgccgcaaaagcgctcccctccgctcgcccgtcgcagccctgacagtgcaagaaatcatgtagcacgtacagcaggtgttcttgggtaatagcacgtacaactgcccctggaattctaatgctcttatttactttaccctggaactgccaaaaaattatgtggtcatgaattttataacagcatgttaatataaactaggaagaaagcccgcgcaaatgcgccgacaatttatttattgtttataaaaagaatcctgaaataagtcataccttaacaacacgctaacttataattgtaagagagtaatattgatattgtggagtagatcatagattttgacataataatgataataactgtcatgttcaaacaaaaatcattttatcccattatatataatcttgcctgtcaccacgtttctcaaacgtgtgagttaatacaggtttttttttcttttattatacatctgactcacttcgtgggtaatatacgatggaataatctatattgtcaaaattatttgtgccacttgttttatttgtggggtgctaattgttaacactatttagatgagaatcacataattataagtgatataatgtggttccatgtgacattttcgattatatgtaagtatgtttgttctagcaaatagtaatctctcgtatgtatgtactttttccttttcttgaaaaatattcttctctcgtaggggttaggtgtgcatatgtgtattcatatggtggatctgcacatgtttatatgagtgtctacgattacctttaccttttagtaaaaagatacttttagaaaattggtgagatggtgtgaagcggcgcagcagcgtcatggcttctttgacattctcgtcaggagtaattgctacatatatgcatattttgagaaaaacattagaactgcaaagaaagaaaaagaaaactacctgatggggcgtttcatatacttactcttcgttttttttttctttttgacatatcttgtgtacgtatacatctagggaggaattagctagattctagaagcaagggattacttgaatagatctactataatggtttaagataatagattcaccgatttgagcgtaaagtaatagctagatgttttacttttttctaataaattttcttagattctctcacgtgccatctttaaagtgtttgtaggaatgtaggaacgctattactcatagtcacaatggattacttggatagatctaacgtaatagtcgaaaataatgggtccaccaatttaactgtaaatcaatggctagatgtttttcttttttgtcttatagtttttcttatatatattttctctaatttattagagcatcacgtggcatataaggagtgtttgtaggagtgttgaaacactattactcgatcataatcacgatctagttgtactcaactattgtttgtcgtgacttgatggcatcctctacttacttatcatttcttgatggttacccacttactatgttcctttattttcttcctttattttctgtacttgatcacacgcatgtttattgttaggtgcactatgcacggatgtctcgtaaactataggacttggcggttagtggacagtgatttgtatatagaatctatatacattaggattagtaggaacatacaatggatacattaggctgtttcggattgacaaagtatattatatactacatattaagtgttttagtgcataagtaataaatttaagattaagttttaaagtgtttatttgattggttactccctcgtttatcgtgatcatgtcttctgaactactgtgcgtgttttgtaaatacttcctatacaaaagtttttctagaaaaataaatctattttcaagtttgtaatatttaatacttaattaaccttgtgctgatgacctacgtcgtttaacgtgcccgggataacctcaaccaatgagctagatcaaatgtagtctaagtaggagatagaggacgtcggtgtcaaaataaaatatttgctcgttaattttttaataatatataaataaagaaaaccataatttagtaatgtgacattttttaccgtacggagtgagtattttttaataatactaatcaaatatatttttataactttaaacataaaagcatagataatatggaattgaattattagtttgggaaagaaaaaaaaagacgtatttttgggaggggtttgttatgtacggatgtacatacgttcatgtacggagcgatgtgaggctttctgagataaatttagggagaatagctactttagttcctaaagtttctctgtaggatcagtttagtccctaacattttaaatggtccaaagaaatccttaacctttgtcataaggcctagaatagtccttgggtccaccaaaatcatcatatggatatgccatgtcatcattcatgaaaaatctatgatgaattgtctaatttacccttgcatatatcatagaaaaataaatataagggtgaattaagcataaccatagaaaaaaatacttcttttttcacccttttgaggtataattttctcttacatataccatatatttttttaaactttttccttttattttttattttcctatgcgtaagggtaaattggacaaatcatatagattttgcataggaaggtgacatggcatgtccatgtggcgattttggtggaaagaaggactatattggcccacatgacaaatttaaaggacttatttggataatatgaaagattaaggactaaaatgacccaggagcgaaactttagggaccatattagctattctcccataaatttaaatggaaaattttcaagattgatctaatggtggaaaataatgggtccaccagatttaatgaaaaccgatggctagatgttttgattttctatagcgccatgtggtgacctgagagtgtttgtaggggtgctatgtggcggcttaggagcgtttgtagggagtttaatggacttttagtatataatagataatagatagatggatttcattttatcatatttaattacattctttattgtgcttactgcattcgatttttgagatatacacatggctaagttcattgcactctgtaaatgtggtaattaactagcaaagttttggaagtatgaacttgtctgggaaaatgcctgggaactggtcagagtaccatgtggctctgaacactctgatttacagggtttatgagaacactctgacctacttacttgaatattgattctgaattttatcttattatcttcctagatcagataatgtatttcatgaggaatggttaaaataaattaacatgcaaactgttgtattcctattaaggccactgtgtgagggacgacgctgcagctgctgaggtcctgttaccgtctctccgtctctatctcgttgccacctccgcctcaccacgggtacataggtattcatcgacaaaatttctcttagattaatctactcaggttgtttcactcggacagtgaccttgctgctaaccatgtgagtaagggcccgtttagttcccaaaattttttcccaaaaacatcacatcgaatctttggacatatgcatgaaacattaaatatagataaaaagaaaaactaattgcacagttatgggggaaatcgcgagaccaatcttttaagcctaattagtccgtgattagccataagtgctacagtaacccacatgtgctaatgacggcttaattagtctcaaaagattcgtctcgcggtttccaggcgagttctgaaattagttttttcattcgtgtccgaaaaccccttccgacatccggtcaaacgtccgatgtgacacccaaaaatttccttttccccaactaaacacaccctaaatcaaacaatttatctaccctataattctgtcaccccaccatcaggtcactgtcaatccataacgccatgcagtcttcttcacgccaacaccgagaatcacccctgcccctctgactacctgatatcaaccgccagacaccatcgcccgtctccacgcctcgtctaccgccttagttatctcctcccatcctctgctccctcaccccgatctccctccccaatcaccgtcgcccgccttgtcgactgactctacacagccacggatctgtgattctcacaaaggtacataaatccctcctccccattctctttctcccccatgaatcggatcaagcatataaacttgtacagttctgatggtgctttaaacaaaaaatctctatgctatcaaaattaatttgagaacataatctagaggatagtaaattgatgatctttatgttactcacgaacgtccttttgttttgtaccatcatcattcaggtgaaatattgtgtgattatcttctttataccatctcgtgctatatgcgtccgtttgcactggaatggtaacatgactatgttaacacatgtctctctaaatatgtacttttgccattgatatattttagtaatcatgtcatgtagatattaaaagaagacgttaacgagatgaccaacaattgttaatcttgttacacatggtgaaactattaagttaacttctgcttcatatcaaactgttatttgggtttatattcacgccctcgtgctctgtgctcaaagggcaacgatcgacgtgtaccttgtgtgatgaatagaaaaatcaagattttaaaagttatcaaatacaaatataattacaccgtagagtttagcacgggcatattactagtcctactagttaccagcccatgtctttgcacgtgctagttttatataaaattgggataagtccattttacaccctccaactcttcgcttcgtctaaaatacacccttgaacttcaaaaccgggtatttggcacccctaaacacattcaataccattcattttaccccctcaagcggttttcagctggttttcacctatgtggcgctgatgtggcggtccagtcagcaaataaaaataaaaaggatagccacctcttcttcttcctccatctcccatcccctttctctccttcctctttctctctctatccttcttcctcccatgccaagagagcagcagtagtggcatccctgctaacatcctcgagctcaacgagggagagcggtggcagtggagctcaagcgaggtagtcgggcggtggcgaagctcgcagacgccaacctcattccagatctgacggtggaagtggtgtaggcaacgacgagctcgcggacgccaatgccaagttgccgacgagctccattcgtggagccacccccctctccccgctcaacacctagagttccatgccctttcgccgccggtaacattgcccaacaagctcgagttgaaggaggagatcgcacaggcggcttcaagcgagctcacagtggggtcgatccgcatccatcaaccctcgtcggagcttgctggtgaccccgtcttctccgtgcacggcaacccgatccacgtcaagctcaccgtcaacctccctattctccgcatcaatctcgcagctgacctccctcttctctcaagcatggcgagatcttggctgatctcagagaagacaggttcggcgtcgagctcgtcgtagcctagatctagggggctgaggcgtcaacgacacgtagaggcggaactcgccagagcccaagttatcggcgagatcgaccgaatctcttcccccctcctccccgagcacatcctcctgtatgcaccgacgagctcgagctctggctgccctccgtcttcctgagcattttcctacatgcgctggcaagctcgagctctggctacccatagtctccccaagcgcctcctccgtgtgccgtcttgacccacccgtctagagcctcctccttctcctctagctgcagatggggagccgaaggcagagaagagtcacccctgcactttccccgtgccgcggctggagttggaggcagcctcatctcctcccttggcgcgagctcatagaggaggtggtgggctggtggcgcggcttgccgctgggtgtgctaccaccgataggggagagagagtgggggagaaaggggaaggaggaagaagaaggccagactgacatatgggccccactaatttatacatatggtatctgacgtggcattcttgtatgaaaaaaacggggtagaaaaccggggggggggggggggtcttttgcacggtattaaaagtttgagggggtcaaatggttttagagttaaaggtgtgatttagactaacggaaaagtttgagggtgttaaatggacttaaccctataaaatttaattaaaaagcataatacttagacctaaatctttttatgttcgtacaaaaattttgaataagatgaatgatcaaacgtttgtaaaaaagttaacgggatgacataggagtacataaaaaatggaggtagtatttactcaacttccatgactgcgtcccagattattgcttagtggattgtggggccattccatactccaggtgtgaggctcgcctctcctcacggcatcacaacatgcaaccactaacacagcacagccacgagagagatcgatcgatcgatcgagagtgtttctgatcgagaagaatgcttctgacaaatcgatccctctgaaatttcgttggtcagagatcaatcgattcttcaagaaggaatcgcaaatcgcaatgcatgcatgaggaagcaattgcatcgatcgatgtcatcagcaatggcggcggcaaaggaggcagcaggtgaggaggcgtcgtaagatgtttggcagctgcggcggcgggtacaggacgcagacgatcaacgggaggaaggggacgttcgtgcggctcgagcagcaggaggatcaggagcggcagccggcggcgacgtacaccatggacggcagcggcggcggcggcagggtgcagcacgtgatggacagctacttctcgagcgcgcccaagatccggacgcggtcggtgcgcatggcggcggcgggcgtgatgagcatcggcggctaccgggcggagcggctcaagagcatcggccgcgtgttccaggaggacctcaccaacatgtcccagaagatcttcgacccgcaggacgcgttcctggtgcggatgaaccgcctcttcgtcatggcctgcatcgtctccgtcgccgtcgacccactcttcttctacctccccgccgtcaccgccaccgacagcaacacctgcatcggcttcgaccgcggcctcgccacgggcgccaccgcggtgcgctcggccatcgacctcttctacctcgcccgcatcgcgctccagttccggacggcgtacatcgcgccgtcgtcgcgggtgttcggccgcggcgagctggtgatcgacccggccgccatcgcgcggcgctacgtccgccgcttcttcgtcgtcgacctcctctccgtgctcccgctgccgcagatccccatctggaacttcctccaccgccccaagggcgccgacctcctgcccaccaagaacgccctcctcttcatcgtcctcgtccagtacatcccccgcctcgtccgcttctaccccatcacctccgagctcaagcgcaccaccggcgtcttcgccgagaccgccttcgccggcgccgcctactacctcctcctctacatgctcgccagccacgtacgtccactaatcttctcattcgatttgtaaatttcacataacgtaagtaccttcaagtttcagaaaacaacacacgtttcgatacttggcatttaaccagtgttagaaattccggaatgaaattttcgaaatttcggaccccccgatacgatattatttcggccaaaatttttaatttttttaatttggtaatattttgttcaaatttgaccaacatttgtttaaaattataaaaatttcggtatatcagtaaccaccgatagaataagccaaaacaaaatatatattaagccctgcaattaactacatatgtttttggattaaagcttcacaaaatcaaactatcaacgaattgaacgacgtgcgagatgacgaggttgttccacgtccagcgcacacatcctaaatatatatagataaaaaaaaccacgttatctcgccattgcacatgttcgttgatagtgtgattttgtaaacatcagtaacaaaatatatgtaggtaagtgttaaaatatgtatggttttctatattgaaccaatttacttgtgatataacaattgatactacaatttcgattagatggtgggggcgttctggtacctgctatcgatcgagaggctggacgactgctggagggagaactgcagggtgctcaagttccatcagtgcaagaagtacatgtactgcggaggagggaacctggggcagtcgggtttcctggagtggaggacgatgatccggcaggtgctggtgatggagtgcgcgccggcggacgaggccgggaccgggttccagtacgggatcttcacgacggcgatccagtcgggcgtggtgtcgacgacgaacctggtcgccaaggtgctcttctgcctctggtgggggctccagaacctgagcaccgtggggcaggggctgaagacgacgcactacaagggggaggccctgttcgccatcttcctcgccgtgttcggcctcatcctcatggcgctcctcatcggcaacatgcagacgtacctgcagtcgatgacgctgcggcttgaggagatgcggctgcggcgccgcgactcggagcagtggatgcgccaccgcgtgctccccgtcgacctccaggtatgcaagtgggttattttagcccgctaattatctcacttctagtatattttttcttctatactacattcgtcccatattatttgtcgtttttgacttataatgtttgaccatttattttatttgaaaaattagtgtaaatataaaaaagataagtcataattaaagtacatttgataataaaacaagtcacaaataaaataaataataattccaaatttttttgaataagacgaatgatcaaatattacaaataaaaactcaaaacgacaagtaatatgggacggaggtagtattttgtactaccatgtgaaaaatgaaatagcaaatggtcaaacattataagtcaaaaacgacaaataatataaaaaagataagtcataattaaagtacatttgataataaaacaagtcataaataaaataaataataattctaaatttttttaataagacaaatgatcaaacattacaaataaaaacttaaaacgacaagtaatatgggacggaggtagtattttgtactaccatgtgaaaaatgaacggttttgctaaatttatatcgacacatatttgccctggttacagtcgattttcgagccgcttgattctctgtgagatccgtataggagcagcgtaaatacgaaccgattctgctggaacactggcaattaaaaccaacgaccctagccaactagtcacctgtgtttttctgtttgcaattatatatttattcaaatttatacggtgcttacacaccacttatatatataattggtatgtaattttagaatttacatatgtaactttaagatttacatatgtaattttgagacttacattataaatacactaaaattacatatgtaatttagagacttttaatgtaaatacatgccgactattttttagtgaaaaatatggcgccataaatatagctactcccatgatgaaatagtaagcggatttttataccggtagccgaactacccacttgcatccctacctccaggagcgcgtgtggcggcacgaccagtaccggtggctggagacgcggggcgtggacgaggacagcctcgtgcgcagcctccccaaggacctgcggcgggacgtgaagcggcacctctgcctccgcctcgtccgccgcgtgccgctgttcgccaacatggacgagcgcctcctcgacgccatctgcgagcgcctcaagcccagcctgtgcacggaggccacctacatcctccgggaaggggaccccgtggacgagatgctgttcatcatccgcgggaggctggagagctccaccacggacggcgggaggatggggttcttcaaccggggcctcctcaaggaaggggacttctgcggggaggagctcctgacgtgggcgctcgaccccaaggccgccgccaacctgccgctgtcgacgcgcaccgtcaaggccatctccgaggtggaggcgttcgcgctccacgccgacgagctcaagttcgtcgccgggcagttcaggcggctgcacagcaagcagctgcagcagacgttccggttctactcgcagcagtggcgcacctgggcgtcctgcttcatccaggccgcctggaggaggcacctcaagcgcagggccgccgagcagcgccgccgcgaggaggaggaggaggaggaggccgcgtcggcgtcgtcgtcctgccagatcaccaccaccgtcctcgtatcgcgcttcgccaagaacgccatgcgcggcgcgcagcggcaacggtcgcgccgggacgccaacctcatcgtcctgcccaaaccgccggagcctgacttccagaccatggagtactgattggtagtgtcgaattatacacaacatgcaaatcttgatggagaggaaaccaattatacttttgtcagtctggctgtaccgctggggggatttgcaattataacactgctgcagcaaatttcttatttactttacatgttgaggtaccaccacccctggccaggagattatcatacaatccgtgcagaatactggacagattcaagcagtggcacatgaacaaaatgcaagacgatcatcacaaattcacaagtagttcatccgattgggtaggttgatgccagctcgcgctagaaggtcccttgctattttttcagctgaagcaattacctcctcctggaatagaccacaggaaaagtaaaaaacagagccacagaggccagagtgtgagagacacaatcagttttcagtgcattataggtacttaagcagggtgtaaaattattggttggtgaaccagacaattatataccaaagcctatttttagcatatggtcagctaggggtaggactgttggagtaccgtttctactttctaaccattagaaatctgaacttcagaagtgtttattcctcatgaatgttttgacattacctgttctagtttaaccagttcgtgaattgttggcatgcaattatgttcatcgtgtttactgtttaatctagcatatttggctcatctcgatgtgtaaggtgcaaatacttgagcagtaaattacctcattcaaattcacgatcttcttttccctcataatccatcgaccgttgcacattacagattcaatattttctgttctcatgcagtaaactatgttggcaatgctgcataacgggaagaaggtgagtcaagtattatggcatgaccaaaagtgtgtcccaagtcactactcgacaagctagatacatcaatgaacaatcagatccagtaatcatggccatagaaagctgttaattggttggttgatggattcaaacaaaagctgttctaaaaatcttgagagaagtgaaatgaaacccgtttgtaaagcctattttcaatagtaccgcaattcaaagacttaaatcaactctgcaaggtagcagtgcttaccagtcatgcactgggaccatggaccatataagtggattcacaacaaccatgtccgcctgcacaaattagaatactgaatactgtaatgtcaacttaggaattaatatactagaactcaaacgtcaagaccatttgaattccataggaaatcataggctcgcatgatgatacgatgcttatgtaggacagagaaatacaaaaacaacatatcgcaatttatttaatatggattttgagatgaatatggaaacaaaatgtgggcagtgttaatactcataaggctatcgaatgcaacacatgacagaataacagctaatggaatcaccttcttcccaacctccagcgaacctatttcatcgtcccacagaactgcttttgcaccattaatagtagccatcttcaatacagtctctgcaggaagagcagttgggttcgttgtaccagtgatgtacgcctcacgccctttgttaataagacaggctaggtacatctcatcaactgcacaaacgggtagacatgtaaatgttttatatactatgatatatatcgaggcatcagtgcagacacggtggtggataacgaagtaataaaaaaactgcctggaaacttaaaaagaaaagatggatatgacctagaatctagcagagtatgcaatttatgtgcgaaaatattttagtttcaaattttcagggagaaggaaaaacggattcatcaatgaaggtcaaagctggcaaatgatacatatattaaaaaatgcagaaaaagcaattaaaaaggaaaggtgacacctttgtttttaatcttttttccacttgaactttaatatcaagattaatttaaccatgcgtgctttccgcaagttctattcgtttttttcagttggtataatgctactgtgcatgactgcacaccagagtaagcactctggtctcaacactacatagcaacttattaaaaacaataatttgtttttttgtggacttaattgacagagagttgcaaaatgttaaggtgtatccaattaagatgtatataatctacatttgatagtataagaattgttttgcatgacattagtcatgcctctagctcataatatgttttgtgttaaggatttctgaaacagaccaatgctcatcctgttattgcttggcgctccatctgtaccaagagagacacaaacaccagaatccagcatttctctaattggagcaaaccccaacatcctcatagcagatgcggggcagtgagaaaccttaacatcagcctttaaaaagtgcccaatctgcatgtaagaaccttataaggtgaaaactttgaaaaaatggtattagaagctacatctttaaaaatccagacaatctatcaggaaagagatgccaaacaatgccaaatagaatttaacaaaatccaacagactgacgtgacaaaggaaacatttcttgtacagctgtggcagcagattcatgatttgtcaagtgatgacttctacatgatgtaatcaagcgcaaaattagggtgacttcttacaactagaaagaaacagtatttaccatagttttgatattacataggagtaagtagcaaagacaacggacaatgtaaaaggtaagacttcataatgaaaaagtttactcacctcaggcttattcaaccaaacagaatgagcagccagcaaattgctcctcagaaaatcaattttctctaaatatgtcactgtcccatgatcaattcccttagtctgcattaccagctcattttcatagggtatttctgcaatatgctgtacagaagtgaaaatgaacgagtaagaaatttattgatgctatttaagcaacaagctattattgtacaaaacttctagggagcaccaccaaaacagtaaaagaactcaatgcagtaccgaaaatatgaaaacttagctgaattcccccatgcaattgtgaggctagatacacaatacatatgcttatatctgcctatgcaagaaaattctagtaaataactgaaaatacatatatccatatgagaatgagatcataaaaaattgtaagtagtattgaccctaacatatatgatcaatgtcaatttgtataatatatgtttgcaaaaataagtggtgtggactgtttttctctggtaaatacgatccttcctggccacacaaaatggaatgtgaaggctacttttaactttgtacttaaaacattaaagatgtgaaaaatagttttttttttaattgtatggatcaaataacgcagcacactatcttaaaacagataaatttggttgcaccaataaatcgatttacataagtaccatgtggattccagtattcagtttctgtgcagcatctcttgtttcaagcagtaaacgatccgttgcattcatgatctgtctcaacccaaaccatatcctgatacgcccatcagctgtgttgtgatgcttttcgtatagatctttctgcgactgtggcaacgcaatgcaacttgtcacttgcatcaataaaaaacaggcatgcaatgaataaacagtcaaacacatgtatatctgtatttacatgaatcttaagttgtgcaaaacagaaactaccaaatatgaatagactcaatttgcaaaacatcaaacaaaagttcctaacagctgtgacatggagaaaaaaagaaagggaaaaatggctcaaaaatgaatacattacattgtggacgaatattttctctttatttgttgttttggacttctttacattacattgtggacattatatggacaaagatactagttaggtattgttgaatttcaggcatgcagcatgttcctagataaagaatatgattctctgataagcaagactgagttctttccccaaaaaactcttcctattcaagatcctgcatgtctgacttcggagattttactgcaattgtgccttgaattatttcaggaaaaaacttctatcatatataatataagtcctgaaagccatttgcatgtgtatgacagttagtacagagctaaatggtagcattatatataagggaacaatgggacatatagtcctcatgtggttactaaagatgcttgagttcagatatccagtaaatgattttattaaaagcaaaaaaaaaaaagtgggtaagcagcaagtgacaatgttcaagaaaatggatattcgttacaggtagtcaacatatggaaggaaatgatgtgaaacaaaactaggataagttccaagccagaagaaaacctgaatgcaatcatcagttgaacaagagctccagtttggaggtaacccatcaccacaatccattattgattttgtcaagcatgcacgcaatcccagcaactctactgcacgtgccatttctgaaacatactgcccacctgcttccgcaaagcatgttacctgtcatttgagttttaaagggaaaaatgttaggaacactggctaattcgcagttacagatcttcatgtggttactagtttgaacataaatcctattcagcaaactgagaaagtacgaatcaagtgcagcacaattatattgcagagcccatttcatatatacgagaaacatatgtagtgtgggtcagaagggtaggaaagattgagttaaacaaaacacaaaattaagattatccaatccttggattcttcatgcccctatcttcaagaatatcaggaccttcggactttcacagaaaataaactgactggacagatgtgacagaagttttaaggaaacacaaatataatcaactttacctcatataaagaaacctacaggctacagaagaagataactgtatccgtccagcatgatgataacacaaatactaccagattataaacctatgagcctttaatcatgaatacaattaatagcacaatggaatacaattaatagcacaaaggatattaagaacttcagatgttgatttctaaacattgttttgatccattggagtagtaaatgaaaaataacatcttcagatattgtgaaccagcgttatcataggatttgatacttttgaggccagaaaccccatacattttacttctgaaattactatagtaccatttcgctcatgttaaatccacctttctatacaatgcaatgttcgataacagaaagaaacaatcgaatgcagtaaatatgcagaggacattcaagcaagatgctatctgggtttgtccaaagtacattcacagctctgcatctccctctgacatccccagaaaccataagtgcatacttcccatgacaatccacatccaccacatcgtggacataaaactaacaattcgcaaatttctccaacgagaatgcaaatcatacccaacactgtccaatataaactaaatcaagatgcaagaaattttggtcaccctttaaacactaacaggcacacccatcatcaacagatatactgcatggactgctcaattctctgaaagtgctctaggcgccaaattcagtcatggaatcgcaatcaagcagtgaaaaatttgttacaggttccagcaaacacgttgacagtgtcactatcgtgagaatttccactatcgtagtatcagaggaactgaactgatgtcagtcaggggagggttagctcaccccggatcgaatgagctcgatgccgcagaggagggtggaggcgtaggagtcctcctccgtcatgtgggactcgtatggccagatcctcccgtgcagccacgccatcaggtcgacgtcgtcggcgatcccccgcgccagctgctgcgacgtgtgcacgtgcgtgttgacgaaccctaccaaaccccaatcgaacaacaaaaaacagtaaaaatccagccacaaattccgattgggggaagagcttaaaatcgacgaatcggtggaagtgtgcggggaatgctagaaaccaaccggggaggaggatgcggccggcgaggtcgactgtcgccgcggccccggggaaggacgagaggacgtcggcggacggtcccacggcggcgatgcggtccccggcgacggcgacggcgccgtcctggaagacgcggaagccgccgtccatgctgacgacgaccccgccgtggagcacggtgacttcgtcagccaccgccgccgccgccgccatttttgcgcgctcctccagtccccgcggcgcgcgtccgtacgccggcgaagctagtgagctagtggattgtttttctcggaatggagaccgaaatgattgaggggaggggacactgtcgacactgagacggcgaggcgtgtggagtcagccaactaaccaaatgatgaggatgagatctgatccgtttattttcgatcggtaggtgactaagggtctgtttgaggagctttaaattctgagaagcagttgtttggtagccagtttttgagaatctgaaaaagctttgaaacccagcttctccatcttctggcttcttagtttatttttcagaatctgtaactacagattctcagaaactgtggattgtttggggcagtttctagcaaaagatgggtttgcagctaggagaagctctccaaatagggcctaaggctgtgttcggaacgatgggttcctaacaccacagtgcgcacggaaaacgaaacggtccattagcgcgtgattaattaagtattagctaaatttctttctaagcaactttcgtacagaaactttttgtaaaaacaaaccgtttaaccgtttgaaaaacgtgcgtgtggaaaaaacgaggtggaggagctgtgaaccagccattctaaacacagccttaggagaagctgtatgttttggagaagactaggcatctggagcctgatggagagtggaaaaattgggcatccacgtcatgctgacgtcagcatgatacatgtgtgcaaaaccactttaaactattttttctcttaaattatttatttaaattatggtccaattacaccattaaattcattgcaattaaatctttaaaacaatactacacatggatatgttccgataaaaaaaatatttagcttattattgaaatatttttaaatgttgcacgatgttacatcaagtatatcggaattgtttcgctgagtagatcgaaaatatttcaatcgtttaaatcgggcgttgtttcacgttacataaccacaatgtttcagcaaataacgaaagaatgtttaagtcactgcaacatttgattcatacatagtgaaacattacaagtacactaggtgaaacatttttggtggaaaacaaaaaatgaaacgaattatcttaatgtagggtatctaaaatatgtgggtaacaggagacgtggcgggtgtttataggggcacacgtggtgcatggtgggctggcgcggcatgcgcgcgtcgtgcggcgggggagcgcccaatttttgctcccccgccggtcgaccgatccctggtgtttcccatatgttttactcataagatagtgacactatcaacgtgtttggttatgaatattcacaaattaagaaagagtaagtagtacatctgtgtagcttgaaaatactttattgacacaatacaggcagtgcttgcttgcttgctttgggaggagacaaatccactatattacatacccagataacaaaaccacttatatttctggacagatggaatagttatggaggcatattcaacttttaaaacaagttaaaacatatattatgaaagtaactacggatcagacggcagatgtatgggtgaaaggtcgggctcccacgatgatatgcattttagttactactactgatctactgctaccacgtgtgtactccctccattccacaaagaaacgattcatcaagggaggactttgtctaaaaaaaaccgattccaacacagaaaacaagaaactttaactctatcataatgctggccataggtggatggcgactatcttctctctttcacaccgtagaaaccttatctcctcccggttgtctctcgcgtttctctcccgttcctccccgccgccccctcttgtatcgattgcatcgatgcggcggcatccagatgccgaccctaccaagattctgactccctcccgctcctccccacatgttcttccccgctctacgctgctcctcctcgctccccatcttcctgcgaagttccccatccaccaggatgcggtgggggagggttgcgagtagttagatccgatgccggaggcggctccggtggaaggatttggctcagaagcagcgttcatggtagcggcaaaacagtttatgttttttattcaagagacacgagccaaggcggaggaggcgtgcggcttgtggttttgatccaaaaggtggcggtgggttgaggtgattcaaatgcgacagctgcatcggaagtttgcacggatgggatgcacaaggaggtggcggtgcctgcggatctaatacaggagggggcaatggaggacaaggcttactgacctcctattatgattccagtgccaacagctggagattttgttggcggtattgttgacggaaaacatggcggcctgagagatctgcttaattccagtgcaggtccaaggctagcctcgagtatgtcaagggcgtgccagctgatttgatccgacaatcaacaagaaagacaaaatcagagttagtaagctgatagctgatcggccgatagcatatcgttggtggtctcagccgatgtagttagaccaaatcggttatgaactgaatagatcaaagaataaaagaccctaaataagcctcatcggctacaaatactgcttattaggtttgataaagaagtttaatataatattataaaactagccgatggaacaatatttagagcaaaatatatagataatgatgaagtacttgctaatactctagtataaacttatataaacaaatcaatctttataaatatatcaaatcatgatcagttagtaatttagatagccaagccgatactgatctaacttgatatgattatatagaacgatctgtctatataaatggcaaatatacataacaccagtaaagaagcatgtatattaggtaagatcggcgctgaaacttcgatactatctctaattatgattaattccaagttagtttttagggttctacacaagactagggatgatgcatctcaaagtaagtagggaaacctaaagtctaaacaatcaaggaattaaccacttttcaagatggtagatgctttagctaatctaatctagtaaggcaatttagccgataccagtaggaaccctaaagcgagaaccaactgatagtgctaaattgagatactaatgctagattaactatgacatatgataacatatggttatgataaaaggattagaacatctaaaacaacataatagccccgatagcacaagttattgagacgggctacctcttgtcgagagaactcaccgagaagaagaacaaaaggggtggcgatgcgccaaagttgtattagattgtcttctccattacaatgctattgggttcatacttataccccgagtgcagacttagtccattatagacacgacccaacctttcaatacaaacaagaccatatacggtggcctcttgccaaatctaacaaaaatcgacttaaatatcctaatcaatagatacaattgcctttattcgagccctatctctaattggcaatgacggttatctcaatctaggccgaaaccgagcccaagttatatcgcatcggctacttgctatatcggctaagttaagcctctgtcctgtttgcagcccatatgacgccagccgatacacagtccgacttcgatttcaacttgattctataccaattccgcttcgatctttcttcatcttatccaaatctgatgcaaaattctggtgttgacaggtatgcatggattgactaaaaggtatctcccactcagtctccctgccaccaatgtgttcccctcgtgcaatgaaaaatgctttcaataacgtgtgtagtacagatgcattgggtgcggttgtatccccattctttttatggaaaaaattgttaggtatagaatatctttggttaaactaatgctcttttctcatctggtgttttgtatctttttaatcatctagctgttataattcatcaagtgttaccaatgttgaagtgagcatactctgtagcagttagcagagctttacattttgttatgtgcaaaatttggcatggagtgagaaggggtcatgtttacaagttttatatttaggattatacaatataaatataatcactaaaggcctaatgcatgttagctaaaataaaatcacaaagtgatcgtttgcattatgtaaattcctaatgtttaatcataaatttagtaaaaatatttaaatcatgacaacaatcacaccactctacataataatcacacatgcggggttattttttgcaatgaaattatgttcctgccaagctacgtgtattctgacaaactctacacgaaacaataaactatctcccacactacgaaatcaatttagactcgagaaggctttttatttgaaatatatatattgtgtcacatgcacctatggcatccattaacaaacaatgagacaatccagtatacagagaaaaaaagcaggtatatctcagcaaaggatacggcaagttgtaaaatatgtagccattttagtacataccaaaaggaacaccaaaagtaactatcaagttctattgattgttggcaaacaatgatatgggcacaaagatttgtataaaccattattttcatatccaatcaatgtgaaatgacaactttaagccacttttccaactttattaattgaatgtacaattatgttcatcacacttctaaacaaatgatttccgcgataatacttttcacatgttcctcaaatgtgcagcctcttgtgtgatgacccttttgcctcggactcatgggctacctttagaaataacttttgtaatgtttttacacataactattttagtggagtacttaaaccacaaggttgcgttgaagcttttacatagtgaactattttaggggagcacttaacccgcaaaggtagtattgaatcaatctattcccttggctacaggaaaaaaaaaagctcattttacatcctgatgatattttattcttttaaaatttttatgcttctctacatacaagtcatatttcgctttgacacatcaagagataaagtcaataataattaaacgaatacactaaattccacgacttgtgtgtaaatgcctctaaggtgtcaatacaaaatcaataatagcatttcttataacgatatgattagaaatttcctactaatttttattttaagactcatattgactagatatttttcttaaaaatactgtagggtcctacgcataagaatcactatctaagatatatatatttgatcaatttaaaaaggagatagtaggatggtaaaaattatatatttataagcaattaaagtttctcaagatttttttaaaaaaatacaatgaacattcaattaagaagggaaatacctcactttaatttaaacttattttgttagacctgttttcgaaacgaaataaaaacatgcacgcgcaaatgcacgggttatcttcctagttgatttaatgtagagagcatagaggaagaggcaagggagaaatcggatgtagaatcatattaggacaagatagaaagcacgatctagaaaaaagacccatggacagatttatacaaaaccaaaaaaatagatattaaaataattaaatcaagagaatttggacggatcagctgttgcctgcggtgtcaaagtgacgccaataacaattgcggtgtcaagtgaccccaatagattaaagccatgcaccctgttctatcctttctttctatatagttgatacccactagagaagttagctataaagcttacaccatgttgcgccacgtcgtccttttttcataagccgttggattgtatgttggtatctagatcgacggtgccgccgtaaggcctgctcattggcctttgcatcgaactccacctcttttttctgttggcccaagtccatatccctgcaaaccctttctcgctgtcctccccttccgcatcagcgtgagggagcgcaagggtctcctctcctgcagcgggagtaaacatgagggagacagcgagccccgcctagccggcttcccacttttgtctgttcatcttctaataaatgtttcctgcaatattttgttcgttacatccccttcttatcgtctttatatagatatatgcgcctgctcttactcctcgaaatacacatgttcttggatccattactcagctaatgagggcgacaccccgattcgtgccgttctcaggttcatcgttaatctaagctaaatctctcttgcttatcagtatctattgatgtggactgattatagcattcaaactaatttgtttgtattctatttttaacaggttactcccttcgatttctttgcagtatctgtttcagtagattagtattctttattatacacagataactctatgcggtgaatttgacaactgcagataattcctgtcgcagaactgtcgaaataagatttcggcaaatactaaagggggtggctatcaagctagaaaagtggatgggtttagagacaaatgattttatacaggttcaggccttcttattcaagaagtaatactcgtccggggatggatccgccgagtgtattattgatcgtatgatctgggagaaaatcgtgtccctagagggacccggacccctcctaatataggggaaggggtccgtattacaaaatacagtccatatccctaacggaatatgtaattacagataaaatacaattgtaaccgactaggatctcagatatttccttgacatacaagtttaaatctaacccgagtcctcataaagatattctatctatatatggtatcctgtacctagtcggactaaacatgccgtgtagatatggggtatccataatctccacagtagcccccgagacctttgcagtcgacgaaatagccttctcttgaaatataaagcaataatccgagtgcttcaatcccttctgtatagatcttcgagaaccaaaaccaaaggctgtgaagctcaaaaaaatagaaaaaactgggtgcatcgactagatgcacctaattaggtgtagtccccgactatgtggttatttaaaaactaaacatgtagtcaagaaccgagtggttttacaaccaagcatcatatagcaaagcatacgcggcgttcgataaaacatccagccgactgctttttaactttaatatatcaagaatggaaatatgaaaaagcccgagtgataaacactcaaaaggtccataaatagacatatttgacaagaactcgagtaaaaactcttaagatgatccaccaaatatgataagaatcatggcaattaacgagtctaatagcctaggctacgaccctcaccataatcaaaataagcatataacatgccaagaaaatgaccattagaaaactagtcatctcgaatcaacccaaacaactcttgcagcctaaaaagcttacaaaaattgtataacacttttctgtcgggcacctttttatttgcatcgtagtaattccaaagaattatctaaccgcgtcaaaaaggattttaacagcatcgggtcataccattgtgagcacaaattgccaaagcaaaaatacctaagtccctagggatcacagcgggccacgctgataatagaattgggctgaagtactgtataggcccaggcccattatcactcccgataccctagcgaaataaacaccgaagtccaagcgccgtttcgtcttccccgccgagacgctcgccattttccccatttctcgctacagtgcaaaaccgcgtcggcaaagctagggttcaccaatccgctccaatccatcctccaaaactccgcgaaatccttctgcgcacccaccgcaccgattccccatccccttccagccatatctcagaccaaattaaaccatctagttcacattcatggcggaagagagagaaagcttcgagagtcagtgggcgccctccgatgtgacggaggagaatctgaaagagatggtggcgcacggcgttcttccggcgaaagagatcattgggtggcgaccagcattcggcgaagcgttcccgacccccgatacgcatgaagtcgtggtattttctcatttcttctatggcggattttctcttccaacctcaagattctttcggggaattctgaatttctatgggattagcctgcatcacttgaacccaaactccatagtccacattgccaactttattcatgcctacgaagcttttttgggcattaggccacattttgccttgttccgccgcatcttctttctcaagccccgactgaacaagagcaaaccatgcccttcaaaacttagggaaactttgagccaaaaatacttctccatgcccttcaaaacctcgaacaaaagctggcatgcaaattggttctatgttcaaaaccctgagcctgcacaccccgagtactcctgtctccctccagtttatcaggacacttggaactcactgccaatgggagatgaagccgctcaggcgttggaactgatggacttgcttgataaagctaaaggagcaaggtctgcaaggagaacagatcacccggcatttcatcaagagccggttagctccaattaaagagagatctcgtacagccttcgaatttgacggcaagcatgatccaaaccgtgaagatccagattctcttgattttaaggtcatgaaggagagaatgtacaagatcttctcaaatgctatcgtagtcagctactcacacttactgccggtggtgctgtacaacgcattcaatcctcctccaccggtatgtattcaaacacctcaaccttcctcaaaagcatgatcttgtctcttgttaaattgtttgacaattatgctcaggagttcgcactgatgaagtcggatactccaatcgctcagcgccgatcacctcgcaggcaaactggtcaggggagtggaggaccaaaaattcgggctgatacccaaccaaacacctctaatccagccggccagtcagattcccgcaagaggaaattagttctgagtgacgacgaaggcgatgatgctggaaaacttggagataaaggggcgaccggaaaattaccgaagcaagccaatccgaagaagaaaacatccagtcgtcccatgccgaaaatcaggaagtcttccaggtacaaatcatgcgacgatcttgcttgtgttgacgctcactcatcattaaaataatactgatagcacgactcaaacttgtaggaagccatctgacatagatccttctggaaaggactctaatccgactaacacggagacgggttcttcaaaggaaaccgggtcgaccgccaaagatcacgagagtgataatcagccggcaaccgacaatgtagagcccagcaacaaacccccgactggaaaccagtcggctgaagctggaattggagttgaccaagagcccccgactggaaaccagtcggacacatggttgagccaagagatccctgaagttgaagctcaagcagacagccctcccggaaaggatgccagcaatgacccaggatccagatctcctgtaaaatcacaagagcccactcgtccccgaccggaaatcatcattggtaaacacataatctgaaatcactttgatccaacagactttattcgattgtttcacctttattcatggatacattagggccaatgatcggtgatgaagaagaaatcctccggatacgagcggctgaagattcgcgccctcccattctggtcaagtggtgggatgaagacatgcaacctcagggaattgtaacaaataagcaaaaagaagatgaggaggtatgcctgttgaaaaaggcactcagccaggctactcgcattgtgaacgtaagtttcttcgtgcccggcctcaactatcttgttcgtcatttagctcaagcgctaataaaactgttttgcataggattcatctcaggaatgaagcaaagaccgcaaccctggaaaaattagttccccatctcggaacccttgaggccaccagagatcagctgcacgaagccagagaacttgccaggaaaactgagcatgatctaagggatcggatcgccaagctttaggaatccaactttgaactgagcggttcatcaaagggtaaatacaatctctgtctgacttacttgtgctgccatccttgtgatatcaattaaccaagaagcaatacagtgcaagccgccaggatttctgaactggaaaagcggattcagactctggagaccgacaaggccgaattggggaaacagagggactcggctctgaaggacgttgaaggtaccagcaatcaatgcctcaaaagccattatcttctttacgctaactcattgatgtgaatctgttgatgcagaccgcaagatcaagtcgcaggctgaattcgacgtcttagttggcaaaatcaaaaggcttgaaggggctagggatgaagttgctaacgctgctaccccactcgtccaagccatgttcttcaacaacaatggtccgagtacattcgatgcttccgaaatcttcgacaagttgagagttgctccagatacatattttaagaatatcaaagaggctgggagtgtgggagtgagcctggcgttggcaatgaccaagtctctatacccgaagatcgacattgatgccattgatggctttgcagacgggatgagcgaagaagctgctcttgacctcatcaacgatgcgcagaaagccgccgttaagatagcggttgatgtagttgagagattccaggacaccaatcttcggccgactggtcctgataactctgatgatgaaaaaactgataccgattgatgtaatttgataacaatgattctgatgatgatgatggaggcacaatttgtacaatactgatgaatttatgctgtgctcagtatttcaaacttagcttctgatttcttaaaagcttttgtcaaaccttattgagcctaaaacccgcaaaagctattaaaaaactttcagtcctcattaactaagccaaaaaatcaagcaaggcaatggtaaatcaagtaagtaaattgaattgataaagatcacactccattattattatagtagcccccgactggtaacttcaagggaaagcttgatgttagcagtcaagatagggaaatacaaaggtaataattaagcataaaaacgacgaagatgttcgatattccaagagttgtcgataggagtaccgtcttcccgcttgagtcggtaggaacctggccgagtgacttcggagattataaatggcccttcccataagggggataacttgtgccgatctcgtgtagtttgaatttttctcagaaccaggtcgccgactaagaaggctcgtgatcgaacgttacgattatgatgacgacgcaacccttgcaagtatcgggccgattgaattaaggctgcttcgcgggcctcttccaatcggtgtagatcatctactcggtcttcttcgtagcgctcctcgcgaaagttgcgaaaatgtaaagattcgaattccacctcactaggaaacattgcttctgctccataaactaagaagaacggcgactggcccgtggcccgactgagagtggtgcgcaaggaccaaagtaccgacgacagctgttctacccacttgccggcatagggattcagtcggtcgaaaacttgtgcctttattccttggagtaccatgccgttatctcgttcgacttgtccattgctcatagggtgcgctacggaggcgtaaatactccgccgaagtcttcacaaaagtctttaaatactccgccagtgaattgagtgccattatcagtgatgatccaattaggtaccccaaaccgatgcacaatgttgatgaaaaaatctctagctttgtctgccatgattgtgatgaccggtttagcttcaatccacttggagaatttgtcgacagccacaaagagatgagtataaccgccgactgcctttttaaacgggccgaccatgtcaagcccccaaaccgcaaacggccaggacaacgggatggtttgcatctcttgggctggcagatgagtttgtctggcgaaaaattgacaaccctcacatgtctgcacaattttgtcggcatcagacacagctgtgggccaaaaaaaaccttgccgataagccttaccgacaatggtccatgcagcagtgtcgcgaccgggaaaattgccttttcccgaacgctagtgtattaatccccgtcccaggaaaagccggggtacaccacacaaacatgatataaaagacacatctttattatatcgataatatttacattattacaaaggcacttaaggcctgacaatcaaaaataaacagcagcggactagcgggcctacggctccatcttcacaggcgctcaactggggtataagccaggactccacctaagacttcttctccaaagcttctcttactgaaggggggagaaagatagagcaagaatgagtacaaccacagtactcagcaagccacaccggagatgcataattaatgcaagggagtacaaggggacaataatataggggttaagttttgcagtaacagcctttaaaagtcacttagttgcccaaagccattttataaagacgatcctagagctacacagtattattaaacaaggccgtgaaccctcacgaacctgctttaacccaaggcctacgatgattcagaccgaactggcaacccgaccctgggtcccagctcgtcccaagccaacccaggccaaccattccacatcttagttgttgagcaaattttaagaatttgaaacactgacttgggtacattgctcggcttgcccataaccgagggcgcggctattcgaatagattatactctgatcagaggtgtacatctttacccacaagacacatcttcctcacgtgcaaccacgtgccacataccaccacggtatacggacggaagacgtgacatagttcccaacccatcctagccataaacaagagtaccgacccaatccccctacggccgggacacccgggacaggcaggcaggactgagccccctagcagcagggcaccaaccctctgccatgacatctcgactaccgggccgcagctcgtgtagccttcatttgccctggagaatgtccatcgacccccgacttcatccatctccaatccgtgtacttttgtttatgaccagactgagccacaaactaagccttacccactagacatgtggaagtacggtagtgctttgcaacagaggcccgagcttaatccttatagtggccggggtgctacttcccacaactggcatgcacccaaaccccaccgaaaacaggttttaggggttttgaaagaggaagagaggtgtatgtccaattccaccataaaccaacaattccacagtgaccaaatgatatgaatatacccaaagtctaaaattataaaaccacctaatgttgtcctattaatcagcgaagcatctacctaaattcatactagtggaaccataaatagagtacccactagttggggttttattttcctagggtgaacaaggtaataacaacaatagcaataataataaggtcataacaaaggtaaataggcatggctaaataaaacaatgataacgcgggaatttaaataaagcgataatgcattaatttaaattaaaaataattttgtaaactgggattcaatatgctcaaggatgatgtgacttgccttgctcgctttcccaaacgccggcttcaacttccacgaagagcggatcttccgaagctgcagcgtctacacgaccaacggaaaagaaaaaggcttttactctaataaactccacataacagcagaaaccaagcacaaaaatgggttcttgacttcttaaggaaaaattagagacttgaacggtccaattccgagttcaaatggccaagatatggccctttgaagtttatatgctctttaaatggatatttgcgaatttcttcatttaaattttaattaaaaatctcatttattgcgtcagccgagggagagggcgcgcggaccgggtccacgggaagtggggcccacgcgtcagcctctcggtccacggtggaccgggagcacgcggctggcggcggtcggcgccgtgggtcccacgcgtcagccgcacccgcgggcgcgggcggctgacggccgggcccacttggcagccgcggggcgcgcccgagggcggcctcgccggcacggccgacgggaggcggcgcgcccgcgccccgatggtcaccgccggcgaccaccggcgcggcggagcggcgcccgagagagcggagaggagagggaagcgagaggggcggtcttcggctcaccccggtcgacggcgacgacgggaacggcggccgaagcggaagaaggcggcggcgcggttcgggacgacgaggacgacggcgctccgacggtcggcgagcgaagcggaggagcggacggggtcgacgacgacgcggcaaagacgatggaggcgacgccgagtcgggaggaagaccggagcgacgacggcggcggaccggagctcgacggcgacggcggagagagaggtgcacggcgcgagcacgaatccgacggcgagagcgagcggcgagcggcggaaacggaagagcgaagcacgggggacgattttatagcgccgagagggggaaagcgcggccggagagagaggaatcggccgcggagatctcggccgccattgattgcgccggcgagggtttcgggaatgaaatcggacgaatccgagggagagagagagggaaaaacgggggaaacgggagagggaatcgcggggaatgattcccccctcattatggcgcgcggggacggcgggatgcggcggaatccgtggcggcggcggcgctagggcacgggcgagcggcgggagcggcgggaggaaggcgatgacaggtgggccccacccgtcagcgagggcggcgggcgggcccgcctgtcagcggcgcgcgcgcggggaggaggccgatgggccgcggggagaggagagagagggagggagagttgggccgagccggcccaagagaggaaggggggggaaaagaagacttttagagatttttctttttataaaacctttttaactttgtttatttcttctcaattattatttgtgctctgaaaattccactaaaatttgagggctctttttagaccaaggagaatttaacaaaaattctccgggccacatttgaatttttcttgtacgtattttagtgtttgccaatttcttttcgaattttaattaattctattattccttttagagaatgatttttatttcgggatgaatttatcaggacgtgacaagcagcatgattgctgcagatgccagaatgtatatcctttaacaattgtctcccttcctccaaagacacacaccgttgcaagattcctgatggacttttcttgtacagctcggtctcatgaataatataaagcctgctgcgcctggaaatccgctcggcttcatctttatcttgggggagttcttgtttggtcagaaatcatataaggggctctctccagtcggcttcaaccatagctatgtcttgaatgtctatggcctcaactgtttctttccttggtacggttggttcgtaaagatgttcggcgaacacgtcggaaggagctgcttcgcgtttggaaccgaagttagcgagtctgtcggctgcttcgttattgtgccgaaggacgtgggttagttcgagcccatcaaacttgtcttccaacttgcatacctcttgccgataggcggtcatgttgtcatcaaggcaggaccactctttcataacttgattaacaaccaactgtgaatctccgcgaactatcaaacgcctaattcccaaacagattgcaatccgtagtccgtgaaggagcgccgcgtattctgccacgttgtgagatgcagaaaaatgtatccataacacgtagctcagtctttctccagtcggggaaatcaaaacaaccccagccccagtgcctgaaagtctcttggacccgtcaaagtgcatagtccaatactccatcttctcctcgggcatatcttcttggtgctcggtccactcggcgacgaagtcggctaaagcttgggacttgatcgaagttcccggcttgaacgatatatccaaggacatcagttctaaggcccattttgtgatccgcccattggcttcgcgattatgaagtatatccccgagtggaaacgatgtaaccaccgtgaccgagtgaccttggaagtagtgagataatttcctgacggtaattagaacaccatataattgcttctggacctgaggatatctcgtcttggagtcggccaaaacctcgctaacgaagtagattggtcgctgaactttctgaacatggccttcttcttcacgctcaacaaccaggaccgtgctcacaacctgagaagttgccgacacgtataacaatagcggctcctgcggatgtggtgagggcaaaactggtgcagtagtgagaagtttcttgaagtcttcaaaggctttctgtgcttcgggtccccactggaaattgtctgttttctttaacagcttgaagaagggcatcccccgctcgccaagtcgtgaaacgaaccggctgagcgccgccatgcaaccagtcaacttttggacatctttctgagaacttggcggtttcatgttgaggatggcattgattttctccgggttggcttgtatgcctctatgagacaccataaatccaagcagcttccctgacggtactccgaagatgcacttttcagggtttagtttcatcctgaaagtgcggatgctcgcaaaggtttcttccaggtccgtgatcaaatcatctttctgcttggtcttgacgactacatcatccacataagcttcaacgttgcgaccgatctgagttgagaaacatctctggatcatgcgttgataagttgctcctgcgttctttaatccgaaaggcatggtgatgtagcagtaggccctaaacggcgtgatgaatgaagtcttcaagcagtcggattctttcaatcggatctgatgatatccagagtagcaatccaaaaaactgagtagctcgcagctggcggtcgagtcaactacctggtcaatgcgaggcaacccaaaaggatctttggggcaagacttgttgaggtcggtgtaatcgacacacatgcgccattgcccggtcttcttcccaaccaggactgggttagccagccagtcgggatgaaggacttctttgatgaagcccactgctaacaacttggtcaattcctccttgatcgcgtccttcctatcttgtgcaaagcggcggagtcgttgtttgatgggtttagcgtcttccttaacatgcaaagagtgctcaatcacctctctaggaataccaggcatatcggatggtttccacgcaaagatatctttattattttgaagaaaggtgatgagcgcgctttcctatttacaatctaactcagcgcctattacagttgttttagtaggatcagaaggatctagaggaattttcttggtcttggcttcgctttctccactctttgagatcttggttgtaggcacttctccttcgcttgccgtggttgcagccagtcggatgtcttctcgggcgatcgcgatctcgcgggtttgggccatctcgcagctttccttgtcgcatgtgacggcttttttgatgttgctccgcagggatatgactccttgaggaccaggcatcttcatcatcatgtaggtatagtgcgggacagccataaatttggctaacgccgggcgcccgagtatggcatgatacgctgtctcgaagtcagcaacttcgatgcagacattctctgtgcagaagttctcccgagtaccaaaggtgaccggaagagtgatctggccgagtggcgtggcgcataaccctgggatgactccgtggaaggacgcattactcgacttcaattcggtgcgagggatctgcatgtcatccagggtcttggcgaagaggatattgagtgcactgccgccatcgatgagggatctgcgaagcttgacgttgcgaaccactgggtctagtaccagggggtaccgccccgggtggaccactcggtctgggtgatccgagcggtcaaacttgattgttgtctccgaccaccgaagatattggggcgtatcgggctgaacatcgttaatctcccgttcggtcagcttttgttttcttttagattcataagtcagaaggccgccaaagatgtgattgagttccttgcgatggtcttgaaaacctgtggggcatcattgtcatcgtccttctttttcgacgtgctttgatctccatcggaggtcttccgtgcattcttggcgtattgttctgcaaactgtttgtagacgaagcaatcttttgctacatgattggagttgggatgatgcggacattgggagttcatgatcttatcaaaagtgttgacgcgcgaacgttgtcgggaggaatgtgtagtagtcgcaacaagttcctcgggcttacgcttgcggtccttgtggttgttacttccaccccctcccgtagtcggcgcatctttctttggcttccaagtgggacccgactgcttggatgcgataatggcgtctttggctttggcatattcattggctttttcgaatatctgtttgaccgtcttgggaggcttgcgcccgaacttgccgactagatcttcgtgacgaatgcccttggtgaaagcagcgatgatgacgtcgtcggtaatgtcggagatcttgttgcgttgttcagagaagcgtcgaatataatctcgaagggattctccagatttctgaatgatattgtagagatcaaactgtgtgccagtgcgttcaaaggtgccctggaagttggcgatgaagtggtcgcggagttccgcctatgatccgatcgtgccgcggggtaacccatgaagccaggaccgggcagaatctgctagagccacaggcatgtagttagccatggctttgctgtctcctcctgctgcatgaattgcgagaccgtagacggtgagccaagactccggattagtggtgccgtcgtacttctcgattccagtcggcttgaagccggctggccaatccactcgacgcaggtcattagtaaaggcaacgactccatccacgtcgtcgtcatagcgatctggtgagtggcggtgggcgtagcctcgtgctgcacggcgctgactgattgtatcacgaagatcgacggggcgccgtcgaggtggggagcgaggccgttcaactcggcgctccctgtgtcgttcgggaggtaaatggacagatcactcgtcgtgacccctgctcctgcgattggatcctgcgccggcgatgctgaggcttggctggtgataatcttgagatcgaagatggggaacttggctgccagtcggcgtgcggatgcttccggagttaaccgggaccgaggcggcaatcatggtcttggtctggttcaagatgttgacgacgtgattagcttggttgagcacgtcttccttgaggagggtgtcgaggagagtgatcgccgcaacggcgttctgttgaggggtgcggaagaccgctgtcccctcgatgtcttgctgcccaataagatttcgcgctcgtcgccctgcgtccaaggctcgttgtcgtcggtcctcagcctcctttgcagcccgttcacgttcctgttgctcacgctgcagccgttcttgctcttgtgcttggcgctcctcttcaagtcggcgtcgctcggcctcctgttgtacgtgtattgcttctgtttctcgggcttggcgttgttcctccgtctcgttatcggccatgaagacgccgaaatagagaggggtgtagtcatcttcaaagctttcgtcgaagtcgtcgaggtcgcggttgtcgtagcggtagccggattcgtcatactctacgatctctgatggtcgtgagtcgacgccaggggagctgaagtagccttccaattgatccgtcgaaaccgtgccgagtggctggagtatgacaccgacttccctggagctaggctggatcggcgttgaagccggattccacctagacctacggggagaagacgtccttgtagtgaagatggcagccagatcgtcggggagtttcatcaggattggcgggtaggccccatcgtcttgatttggtggcgttgaagtagatgggatctcgtccgagtggtttggagccgactcgatcgagataagcttggggtagatctcggccgagttcggaataccgaacggggctgggagctggtctctccctgactggtttgagtccgagtcaaggagagagatcttgccgaagtcgttggtgatgagtcgaggctgccgaaccggaacgcctgcccaggagggaagacgaagtcgtcgatgccggagatggaacccatcgcactaatcggcgaaaaacttgacgcaacccctacctggcgcgccaactgtcgaaacaagatttcggcaatactaaaagggggtggctatcaagctagaaaagtggatgggtttggagacaaaggattttatacatgttcaggccttcttattcaagaagtaataccctactcctgtccggggatggatccgctgagtgtattatagatcgtatgatctgggagaaaatcgtgtccctagacttctagagggacccggacccctccttatataggggaaggggtccgtattacaaaatacagtccatatccctaacggaatatgtaattatagataaaatacaatcgtaaccgactaggatctcagatatttccttgacatacaagtttaaacctaacccgagtcctcataaagatattctatctatatatggtaccctgtacctaatcggactaaacatgccgtgtagatatggggtatccataatctccacaagaacatcagtaatcagtattccatatgcaactcatgttgtaaacgtgttgtgacgtgaggtaaacagtgaggtaaaaattaactgcagtttaattattccttgacgaaaaaagatcagaagcaatcctttcggcagcccgtgattcgacaaaatattttgtgattccgtatacggaaatatttttcatatctgctgagaaaggtgatctatacagaattttatgctagctccatccagcttcaccagttcttataatgaccaggtaagcaatcgtatcaattacttataggttttagctagccttttctcatttccttatttcacatttgtaaaatgacttttgatcaacgaagtgtgctcagttaggtaatagctaattaatctacaatagttccatgaaaatatactatctgatttgttgcctcttcaataacaagcattgctcttcatcttattggttcattccacccgaataacctccttatatattttgtaagatagtgttttatatgtaacaaccttatttccatgctttcaaagtaccccatcatgaatgttatcattgttgtattcagtcctttcaaaagtccctatattatcatcctaaagaccaaaacttcatcgcgtctttttatttgtcattgtttacattcatttcttatttgcgattctctataaacatagatcttcaaaatatgtcactacaaatcccgccacaacgcgcgaggtatcatctagttttccaaagagtgacaccattagccttggtaaacatttcactttcactctattctttgttgatttattcacatcccttaggcatatagcatttttaccatccttgagggtgggaggtaccaaaatcctatccgttcattgagccagatccaaggtctgacaacatttagttccgggaggtacaggtttcccgtgtgtgcagtgcaggtaccgcctcgctgtccgtgtggaatacatgttttgaagggcaaaattgtattttttgcattcgcattcgatcgttccagtggattggaccgtctccaactgtccatcctaaatagataaggcaaccttctcaatccctacctcggcggcagcatctcgtcggcctcctccctgagcggcggctacgcctctgtaacaccctagaaactttaacaacactgggatgctactaaacaaacatacatttataacaaataaggaaaattttgacagcatctcctctaaaacataagcattgcggaagcatcaaatataagtataacattgcgagtagccatcaacaaataaacaaggagaaaagaacattcagggatgaaataaactaatttcaactcttagcttcatctagttcaacttaacaagagtaaaattcctttattataaaatcatgacagctttaaagattaaggtggtagtgtggaatgccgatgtgcttctactcccatttccccaaagcgagaatgtcaccttaagcacctgaaaacactgcaagggtgtgagaatagcaagaaaattgttttaacaagttatttaacctaccaaatcattagactatattcataagaaaacaaaggaacataacattaaatataaaggcaaacatttagtgttcataggttcaaaagcaaagaggataaaccacatctgcaatgacttcaggagaaataagccctctcatgaactcaatagagtatacaacttttcaaaccccaaaatgccaaagtgcaatgcgatgcaaatgcaatgatattcctgccttcacacccaacaaggtgtgaagctgcatcgtgttacgacagtacacaatgttgtaccgatacggtcgcaaccataggttcacgacataacttcgaatgaaatgcatatgaaatgcaatgcaagacaataatagaggaataataacacggccataatccttccaatgataccacatataataattactctcactaaaagcataccacattgaccatagttagccgagcggagagagcacagtgcaaaatacataaaataattatttgcacctatggaattatcatgaccgtaggtattaaagtgtcaaggtggaggttggaaaaataacatgttaaaaccgtagcaaaccacagctacattcacttgcctccaaggaagggttggtatcacgcacgatctgaaggaccaccacctaatcacaaacaaagacttagcaaacacattcaaacatagctataataaattaagaggcacgctcctacggtcctatcccatctataaaaagcattgttacttcactatttaataagtttaacattgcaaatgaatacattttatgaaactagagaatgagacctacaactttcgtgtagaaaccatatttttattctaccatttagatggcctaaagcgcagatcaaacgagcttcggaatctgcccgagaattcagactgccacactaaaacaaccatatctggagttctactcgcccaattaaagtgtactttaccaatatggtactcgtccaatcaaagtgtactttaccaatatggaaagctaaggaaaaactctacaacttcctagttataaactttcgcagaaaaaatcgttttgatcctctaattggcgaaatacagagacatagcaaagctaacagcacccagaatcactaatccaaaacacaacacctaaacccatcctctaaccctccaaaaagcgacgaattacaaccctaacacaacctagaacctctgtacaggaggggtaagcctcacctagggttttggagaacttgagagaatatgatgggaaaaccaacccaccactcctctggctcctctcctcttcctcgatccgtttttccaatcagattcttggttagatctatcgttcttagagatctatggagtaaggttaatatagaagaaaagaatatgtgagttccataggtgctgaggggaggtgtggcggcgtcgggtagggaggtgggagttgcctctccctagggatttggtgggggaggtgggctggactggtgcgacttggcccaaattgattcagcccaattccaaccatgttatttttatttttaatttcagggtattacagcctccatccagcctagctagcggcgacgcctcgtctgtgtcgatgtgtctgacgtaagggccggcgaatccaacctacggagtttgcctacccgcactccatgagttgtcgccgcaggcatcgtcggcgcggtggctgccgtctcctgcaaaaccacaaaaatgaaaaaccacgcagcatccaccagccagtacaaaacaatcccgtatacactatcaacaacagtttcgatactatcaacaacaacagtttcaacagttccgttcatcatccgacatgacccttacatggggggggggcgcgcgcggtcacttctcctctctctagtctctcttctctacggcaatatatatacgtatgtatatactatatatacatacgtataattatatatatatatacaattttaatgtaaaaaaatatacacatatatataaagtttatgtgtacatataaaaaacctaaaaaatacgtgaatacaaactttgtatacaggtataaaaacctaaaaaatacacgtatatacgaactttatatatgtgtatacaaactttgtatacgtgtataaaaaattagtaatacatatgtatacaagctttgtatacgcgtatacaaagtttgtatatgcgtatacaaactttgtatatgcgtatataaagtttgtatttgtacatatacaaagttagcatacgtacgtattaaacagaaaacagaaaaaaacgaaaacagaaggtacggatacgtattaaacagaaaacagaaaaaaacgaaaacagaaggtacggaataaaaacagaaaagagaaaccccaaaaaaaaggaacatgcgcaaaagaaaagcggaaagaaaaaaagaaaaaacaagaaaaaataaaccgtacggaattacgataaaaaatcagcgcgcagcgccgccgcccgtgcccccctctccgcgcgcgacacgcgtccagtcgcgcgggtgagggcgcgcgcgactgatctcctcacccgctcacccgcgcgactgatctcctcacccgctcacccgcgcgactgatcgctcattagcgatctcgcccttacgcggcattacttttagagaaaacaagaatgtggtcggccccacgtatcagtaacctctgcgacgatggccggcgacctgctccgccactgcttagtctcagtcatgagtcatccatgtccgcttcgtctccggctgctcatggaaggatgcgggcaacgagctcgacaatcccccgtggcccccaggagggcgagatgaagttagaggaaggtcccaccgcccacggcacggccacgatctcggaagacgcggaagcctccgtctgtggtgacgacggcagcacgtgtcgtggagcacggtgacttgtaggccaccgttgctgccattaattttaatagtagagtcaacagcttgcttcaaatcatctataattaatttaagggaaaaaaaagtacgaattacctcctaaactatagcggtcgaccgaattaccccctaaacccgaaatcagatatcgctcaccctaaactttcaataccggacgaattatcccctcgacccaataaggcggttttgtcctacgtggcggttttgtcctacgtggcgtacgtgggggcttttaactatttgcccctcttacggatgttgcttaatgatttgccactaggcccacatgtcatagacacatgagggcccacatgtcattgacagggtgtggcaaatcgttaattgccatgtcacaagagtggcaaatagttaaatttcccggcgtacgtgtggcactccagccagcaattttctttttttgaatggtgggcccacctgtcatatatactctctcccctgctctttcttctcttcctctctctttggtgttctcgccttctcggcaagcaaggcagcgcgcggcggggcgagcggcgacggttgagggcgcggctgggcgagtggaggctgctgcgggcacggcggggcgagcgggatggctgagggcgcggctgggcgagcagaggcggctacgggcgtggctgggcgagcggaagaggctgtgggtgcagctgggcgagcggaggcgagtgggaggccttcacgcgggacaactcgggggactgcctcgcctagacgcgtcacgcggtcacgcccctcccctccccttcttccccacccccaccctgcccccacctccttcaccccctcgtcggaccaccaccaccgctgacgctgccgccgtcgatgcaactgtcggctgaaatatctccccggcggtctcccacgtcgatcgcctctcgttgcttccctgtgtaatcgtggccggggatgaggaggctctctctctggattgattgatgtgggattgatctcggaggggtggcgcacgtttgggttggggggacaggtggtatggtgagaggagggggaggaggaggaggggtggtggggagtgagcacgggacgcccgagagcgaaatgggcgacgacgactacgacaacgttgactacaccgcggagatggaggctgacgccgccgggaacggcttggcggggtcggtggcggtggcggcgtatgcggcgcgggccggcgtctacgatggcatcgacccgttcgaggagatgaggagttcgatgacgaggaggatgcctggaccttctacaatgtctacgcccaccgagccgccccatccggtgaaactccgagcctcgccgccacagctgcctccactcgcccagccgaccgcccaccgccacgcgctgccttgctcgccaagaaggcgagaatgcccgagagagagagaggagggaagaggagaaagaagaggggagaaagtatatatgacaggtagggcccccattaaaaaaagaaaatgttgactggagtgccatgcgtacgccacgtaggacaaaacctccgtggattgggtgaaggcggtaattcgtccggtattgaaagtttatggtgagcgatgtctggtttttagttttagggggtaattcggtcgaccgtgatagtttgggagggtaattagtattttctccttaatttaataaccaatgcataaaatagtttcatatactacattattaatatctgatcttatcagtcatatacatattgtgttttgtagtccgtactgtagctggctataaatctagtccactgctcctctttctcctcgtgaatcttctcgaaatgtgcttataatatgttactgtattgtacctgctctgatccatacgccgataaaagctagctagtgcctcgtttggatgggtcacaatctgggcccacccacccgtccaaacaactggcctagatgatcttgttttcctcggagtaaattgctaaacacagtagggtgataggctcctctcttctagcagcaacagcgataccatagctatagactaaacttcgttttcatctacttgtctatttgatcatcttgcaatttccagttattttcgtccaacttgccaattacatatccttatcacccttcaccgagctgccatcaagttcacacgtacggcttgtagttggcacccccaatcctcaaatcctggcttcgccagtgactccggcacccccggtggcttcgccactattattccacaccgattaattatggaagaagttgacgacaacgcgttgctgaaatttcatcgaagcaagcatgcacgttaggtgctactacctccatattttaatgtatgacgctgttaattttttgtccaacgtttaaccattcgtcttattaaaaaaaattatataattatcatttattttattgtgacttgattcgttatcgaatgttctttaaacatgacataaatattttcatatttgcataaaaattaaatgcatgtcatgataattaactatagaagaaagaatgagaacccacggatcaaaattcgccttagcaccttggcagttggcctcacctctcgctaatggcgaagccaccgggggtgccagagtgggggtgccaagtttgtagagaaaagcagtaacatttttaactcaaaacaaatttattatgaaattatatttaattaatgatttgatgaaactaatttagtattataaattgtcagggttatggataccatatacccaatagtaatcgactaagctcaacgaggcccaccatgtaccaagttttatacgaaaacaaatatcgtatatagaaggagttccggataagaaaagacgaatagagttctgtatgaaaacgacaaggactacttggattgtatccacataggtttccctagttctacttggacgaggggtatctatgggtataaatacaagcctccataggaggagagaagaggggacaagccacaagacacaacatacacacaagccaatacgccgctatatatcgacatcagagattagcctagacaaaccccatccggttcttacgaaggccggcaagagggatctagtgccatatctgatctcgacgagttcatattcgacgaggaagactaccatgtcgtcgactacgagttggttatccctgcagccaagtcgacgacggctagataggttatcccaaatatcgtacttgtgtgattcagatgaataagagcaacaccggcttcggccaacaggatataggtctattgcctatcagataaggggcccgaatctgtataaaaatccctgtctccatctcttttacttcaatcttgcatatacccttgtacaaacgatccccataccatccaaaatactttagtcgcgatctcaaacgtcgacagtggcgtgccagatagggatctttgtgcttcaaggttttgaagagatgagttcaagagatggattatccaacaataagctactcaacaatttcggatgtggggagatctaacccgaccgaagtatgtctcccgatgagatcggaatcatcgtcatcaactattcgatccggcgagatcgaccaaggttcaagatttcgtcacggcggaagaccaacggtatcgacggcacgtgggattgatccaatatgagtcggtcctattcccaatggggtgtactcggacgcattggcccgattcgaatcgagatcaaacgtcgcactgttctagccgggttaaggtgaaaacaaatcattccgcgtgtggcatcaactcctacagctagctggtgcaatgcatcggcccgctaagtccaagctggacacgacatttactatcaccaaccgagtacaccagcagacatgaggatacaagccaagatttatccacagtccatatgtacaattgctttggtaagatatgtctggggtactcggacatgtgcacaaaaggtaattagtgagattgatttttaaattaatctactaatttcgtagatacatctggcatgtatctataaaaggtacgcaatattttgtatacaatttaccgtacctattttcaagatatatacaatactgtcagatccatgatttattatgtttacctggagcatgctttttatacaatatagcattccctataataggccaacaacggtttaatactgggggctcgccctattttcgtcagtataaatcatgcttgtttacggtttacataatgcctaatatttaatttgctcattatatcctgataatactagaagatttatgcagttttttgggtatatactcaatatcctctgctatatatcttgtcttttagaaaatatttttcaggaacaattgaacactcgagtaggttgtagtcgaatacaccccattatcgagaacgttctcgaaaaatgctgagttattgcacccaacctaccaacgaagactgacgacttatcttatgtatagcaccggctacggctggactatttgaacaaaggttgttaacgtataattcctcgcgaacgttgtcggcttgatcacccaacatgattgcaaacagacatctggatatgctataagttgggtatgtgagtcatgctggccacataagatgcacatgtaataaccaactctagcgcccctataggtgattaagagatgcctactcctggttatcgaccagacagttgtagcaatatctggccgcttatcaatttaaattcacttctggaccattgaactccatatatcgttgtcgaagacaccatttctctatggtcgtacaccgggatcgaccaagtgagtacgataaatattgataaggggagtcacggataacaagggatgctttcgcgaatatggtttgtttttgtatgcctatcagttgcctataagtgatcgagatgcgcctacacccggtcctcgactagtagatcgtagcgatctatcaccacctaaaaattcatcttcaggtgatcgagatacgcctacttttgatcctcgaccagttggttacaacaatctctcgatatctaatgcgacaatcaacatggtcatgatagcgacaaccaagaccgactagatcgccgttgtcaccaggacgacaacattcaggactaacgacatcaggacgacaacagacaaggttaacgatatcacgacatcacacgatgtcgacgaaactcgagatcccttgaattctagagggcctgaggacgaggtagtaggtccgggaaccgaacctccgactacgataattcctcattgtcttcgtcgtcattaggaggcaattctcgtaggtcacgagaatgtcgtccatctagtactctggattcccttcaaatggtcatggtacgactacgactggtccttgatcagcagcgtagctgtcctcgcacctcaatttcaaactgttgagagactcctactcctagttctcgaaccagtaggtcgtagtgatctctcgtacctccacttcaagtgatcgagttatgtctacaactggtcctcgaccagtagcatagcggtcctcgcaccacgacttctaatggtcgagatacgactacgactggtcctcgactagcagcatagcagtcctggtaccacaatatccagaggtcgagttacgactacgactggtcttcgaccagcaatgtagcggtccttgcaactctattttaaacggtcgagagatactcacttctggttatcaaccagtaggatgtagcgatctcttgcaccttaaactgcagtggtcgagttacgactataacaggtcttcgatcagtagtgtagcgaatctcccactacctctgcgatttgttgagtacaactatacacctggtcttcaccccgtgtggaagtcgtctcatcacttcttatacgtcaacttctataagtgtttatatgtacaatatttgtccggtgatcctcttttcttataccgccttcgtcttgaagtcggtcctactgtccctttaagctgttctgacaagcctccaagaaacctaagagaatttcgactgggatgcccagagcagataaggtcttgtcagattctaagagccgaatgactatgtaagacctagtcatgtaagagtgctaaatggatgcgtattaaccaagccatgtaatcggaaattgacttttccaacttcacggttggggactagtgatgagggatgttagtcccgatcttccgataggtattgataaacaatcgatttaggcggagtcgcgacacaactcgatccggcttctgaacgaacacgctactgagctccgcaatcgcaacaccatgtctcctctagttatcaaccgtgccgaaacctggttgacctcaccgagaaggctaatccctgcatgcgaattgaagaacacaagcgataacaagatagattgcaaccaaattgcatataaatgattaagcactctaatttggggttccataaaccgatctagtggcaaaactgttcttaacagaataatctaagcaaaacctgactctaaacaatgacggctattgattaaatatgattagggacgtcctaggattgccctagggcgcacaccccatgggctaagcccacgacacaattacaaggcccaaaacccaaattagattcggactggatgagatatgtggcttgaaagtagactccataagctttccaacaagtactcatgggcctcaaaattccttctagatcagtggctaggtccgtttgaagttgatgctgtcatgaggcccgaattcgaatccaaaacgtgttgaaatttatctcctgtcttctatggaccaaaaaggacgtgctgatatgaaagaagacttggagaaggttttgatttggtccccaatcaacttcttcaatcatccatgcattccttacgctcggtctctttctttcgcccaagcaagtacctctgcaaactaaaacacacaaaatcactatgtagcaacgtttgttcaaatatataacaagtaaatctaatatataacatatgcacctttggttgattaatacataaggtagtcatggttatatccaagctagtcgtgccctcatcagctaggatttattagcttcagcatggtttgttataagattcaagctgtctttgtagaaaatagtttttccataaaaacagctgggggcttggaagggtaccaaactccgtttgttaagggcaactctagcgagcgtgctcttttattgtcacacacatattcaacttattttcattttttccatgcatttatatcatgttacctttgagcgttcgctcgaggctatttctatttaatattctattttgagtatttatttcaggaaagttctattcaatattgttgaagactccgtgtctctacggttctacaacgggatcgaccaagtgagtacggcaaatgttttgagtattgatttcaagaaagtcagacatcagaacattcaagtcagatttcaaggctttgccgcagactttgcagcttctcgattactcaagaacggttgatagagcttgacaaggaatatggaatgaagcgatggtgtacctgccgagatggaatttcttgacttcaatccaaattctcaattacagtaagatgggagacttagtttcatgtctcgtaccttcttggtcaacatcggagattaacctggataaacccaatatagtgcctacaaaggccgataaggggaatctagcgctatttctgatctcaccaagaacggtcaagcgagcatgacaacagttgttccaaggtctttggttgagaacatcaactcgttcatttgcattgaagtcgggggctactgtcagggttatggataccacatacccaataataatcgactaagctcggcggggcccaccatgtaccaggttttatacagaaacaacaaggaaggacgaatagaattctatatggaaacgacaaggattacccggattgtatccatattggtttccctagttctacttggacaagggggcatctatgggtataaatacaagcccccctaggagtagatgggacaaggtacaagacacaacatacacacaaggcaatacgctgctatatattagcctagacaaaccctatccgatgcttacgaaggccggcaagagggatctagcgccatctctgatcttgacgagtttatattcgaggaagaagactactatgtcgtcgactatgagttggttatccctgctgccaagttgatgatggctagataggttattccagatgttgtacttgtgtaattcagatgaataagagcaacaccggcttcagccaacaggatgtagggctattacctacagataaggggcccgaacctatataaaaatccctgtctccatctcttttacttcaatctcacatataccctggtaccaatgatccccataccatccaaaataccgtagtcacgatctcaaacgtcgacataaatattactatatttgtctataaacttagttaaacttgaaacagtttgactttgacctaggtcaaaacgtcttataacccaaaacagatggattatattatggtatatagagacatataattagaatatgtaaaatacatccaaaaccataatatcaaccgttttatgcatatattagtacaaacaacacataaccacataatttaaaatataattctacgaggggcgactgcgcatatcaaattgatgcacaattacatttgggagaacaagatgcgactaggcaaggccaatatgccactccgcaggagccgactgttggtatttcttaacgacattactagaaatataattcccagcaatggcgcagaaatactcctggtatattacggttacagggttcatccgcaagcgcacggatataccattgtagcatttcacccgagagtattccaagggtatcgtatttattttatcccgtgggaagatcatgtagagagaactcaactaataatttatatattatttgtgataatcattttctaagcaggggttaagataatccaagcgtagagtgacacacaagcattactactcatcctcataataaataatctaagctaggtggaaagaaaagagaaagagaatctattcctatacttctaataaaagtacatagcttacaaaagaggaaaggaaagctactagagccatacccgaactcttccgaaggcttccggactcctgattcctattctaattctattccaccagctagatactactaaactaaacttgagaggaatgagagagctcttgcttgaggtgtatgttgaagtgaagagagcgagctccttatatagaggtaggtatgacggttgtggaaggggagttgtccgaagtaccctccaaccgccattaggagaagatctggagcgtccctgccaaaccccacatccaacggtggagaaatgggttcgggcgaaccacctggggctggcccaaccagcccacaatttggctggttgcctcctggacttctcttctccgcggacttgtgaattttggcccagtttgtcatgtcaattctgagttcttggcccattcatgcattagtctgattctcgacatcgtccgattgatttatcgttggtgttgatgtcgattctcctctactttatgatcattctctgcaaaaggttagtaaacctaatactagtggaatattattattctatcatacttatgcattgcaagcatcaccagttctctccggttttagtaatattgacggtcgaaactgatcgataacgaccgtcaacaaaaccccccaagcttgaacctttgctcgtcccgagtgaaggacgaaaggaaacaaagactgggttgttgatcaggagttgctactatgctgcatatctcaaagatacagccgcaaggtatatgtactctctctcagattaaataatctttggcacggtggcttacccttacccctgattcccacgagacactgcttttctttgccttgggcggttgaaagacagaacagcaattagagtaccaaccacccggtctttattcaactctagttccggaagttttcaaatgattttacaaaagaaagccaagttcctcaattgatccactcagtctctctaagtgtatcatttttaattcctcaccaaaagatgtctttttgattcctactctaaggttttgatatgtggagctcggtagagatcaaacatggcattcgcatctgttactaagtcaaaaacttggactaaagcagataactaaacatagtcaagaccaagattgtgcataacgtgtgtggtatatagtggaaatggtgtatgaggaaaaataaaagaaaatgcttctcctttgtgcttactttcttctcccaaaaatccttcttttatttattaggagagggcatggctacatattttttttcaatcatgctcatgcttgatggagcataactttattttttttcataaccatgcctttctctcccctttctttttttttcaaaaggatttttttctttttaggagaagaaagtacatgaaagcatggagaatttattttggtggtaatatggatatggaatggaatattgcttagctcccagtgtaggagtttagcatgtgcatatatgtggatgtatgatcttgatcatagagtatgagaagtatatacacaagtcacaagagtttgacaaagttcaatggaatgacaaacaaccaaaatgtatatggtctaatcatgatagcacatttttggctctggtagtaatgtttatcaaatgaggaactttcaattttatcattttgaaaaacaaaacatccggaatttaagtcaaactaatatcaggatcatagcaactcatatttactatctcatatctcgcaacagcttagacttaaatgagtaagtgcaacccatttacctcaggttcccggataattgttggctacttttattcaatctttgagagagtatttaccaagaaccccatatatcagagatataaaacagagcaactattcatcatttcaacaaagagaactagcttgtcttacctagcataactcaaacctatcctatctttttggtattttctattttgcaaatttttatgttgttttcatttttttataagatgcaattggaaagcaaatatgcaattggaaggggaaatatgcaatgtgatacaagttacctcagtggggggagcgaagtctccccccaagcttggctttcgctcagggtccttgataaggattgaactctgaaatcgaaagtacgcctgaaggtcatcatgttgttgctgcatcatgttattgatgttggtgaattgagcatcagcagattgttgccattcttgcgtttgagctatgtgttccgcgaggtcgtactggatctcccccgtctgcacatcaagggtgtccattctcctagtgatttcacccaagtaccaacgagaggaactcgagcgccattcacttggggttggatgtacaccacttgatctggagggttggttgtccccccagtggatgtcatgaggtgcatgccaccggtcctcactagcggttgaccaggttgagaccccgatgctatggcgtggagcttgggtccatccgggtgcatccccagttggtgcccaacctacctcgtacatcttcacgggtgtagaggatgatgaacttccttgttcgttccttgtcatgttgcgcctccctgcattttccacctgcacgagattcttctatggtctacaggggaatggttagttcatggcagttgtacaaatgataccctgcatttggcaacgggatttcatttgtacaaccggggaaaaagtatattaaagatccatctgctccatgtttcaaattatgcccttgcactagataggcctcctcaatacgcggacgagcggctgagataaaaacaatttagtcgctaatgacccctagcccttttgctatccgagtaatcagaggagtgcactcaacaggagcagagaactttatactttctaaccattgtcttatcatacatttcacaggagaattttttatctttctaaccatggcaaacatgataattaattcatctcccctaatgggtctcagatcacttctaggaaacaaagtcatagcaatccatttgtgtatgagcctaagtgtaggattatggatatcattcgttctaggtttcttgcaaattggagcaccagaaatatcttcccaaaacctatttttctcgaatccagaaattcctttctgaagatcgattttacaggaatcgtgaaaaccaagaagtgtactcaagcctttccatgtgagtgtgaactccttacggaaaaagcgaaaagaaataccaccttctatttctttcaaagtgcatagaaaatgcaaagtaagcaaacgagaaccaggctcatctaccacaacaaatctctgccaaccaacagctttccaaatagaacaaaattcagcatccatacctattttttcagcaattccggtgagtattctcgcgtgtgaacgtactcccggtcgctcagcatgtagtaggcttgtctctctcgatcactgacaaggtcaaggtcagcgtcgctcaggagttgtcgcggagcgtcggcatcttccatcgagacatcggctgatgaacgagtactagactcatcatgacgacttgatggagagcctgaccccttgaacagacaagacagtcgcctcctcatactgcacaatggagcaagaacaggctaactcggcgggggttagaaatgacaagagtttaacccgtcggttagtttcaccaaagcaacttgtatgtatgcaactagagatttgaatttgaggaaaactaatcaaagcttgaatgaacttgagagcaaactttggagacggaaagaaaatgtgttgaaatggggtggaattccctctctcggccggttgtcttaagtaatgcacccacaacggtcaaaactgacctgtggggcccactagccgttacctgaaaagaggaggcatccgaccgttgtctggctggttcggccgaactagggtgttcggccgaacccctggtaggcccaactggcccaactttcggccgttggaatccaacggtcagtgtggtcgtggcactgtgaattttcgtcgaaaatttcattttagtttgctctgaaaatttcatttgaaggatttcctcgaaatgaaattttgaaattcaaacatgtggtgatgcaaaaattcaaattgttgaaagcaaatatacggatacataccaatttacctgttggcgaaggtcgcgtcatttaaagtccgacgtgcaagaccgtacctcctttcgattcagttcacggatgttctacccgtctccggaggtgatggaggaggcgtctttggcttttccttccacatcttcttttattttggtgcggaaggtggcttcttctgagccggctgttctaacttcttagccggtgcaggtgattttaccggcgttctccaacaacgtttcctgggcattattgtttccttttccaggaagttctgcatgaattttaccaggctatccgtcttgggtggctccacttcgaccacttggatattctgtgggcttggcccgtactttatcctgaccatggagcattgttccgtcctcagttgaaactcaaacttttcctccttcccattgatatggaaacggatactccctgttcccacgtcaatgttggctcctgcggtgctaaggaatggacgccccaggatgagcggcgcctccttccctgtgtccatgtccagcaccatgaaatcaaccgggatgaagaaatcccgtatcttgactggcgcatcctccgctatccccgccgggtaacggactgacgagtcagccagttggaagcgcatcggtgttggacttgtcgaattgttgtgccccgatcgagcaggtgatcatggggcaccccggatctttcttcttttcctggagcttgtggagtatcaggttgttgcagtgttccgtcagcttgaccacctccgttgttgggagcggtctcttgttgttgagtatgtccttgagataacgggcgtatgtcggcacttgcatagcgtccaacaacggcacgtcgatatgaatcttttgaatcacttcaacaaaacgagcgaactgctcgtccactgacggtttcctactccactgagggaatggcagcaaccgtgtgtcgcagtactcctgcagcactgtcttctctggctgaatctccttgtctgccgagtcagcagatggcgtttcttttgacatcccattagttcctggatggttaggatatggcggatcacgagtggacttacctcccctcgttgtgatcgccttaacattttcaatggaggagtcgggttgccccggaatcctcccagtttcaattgcagggactaaagatgccaactgagctaactgggtttgtatcatcttattgaagctcagttggttttgaaatacggaagcaaagccatctagcttgacatttatgttctcgaagatcttatcattggcagcaagctttttgcttagcgtatcagtggttatagcttgcgcaaaaacaagatccttcaaggagggttggttggagaagttaccgttattgtttcctccttgataatatggtgtaacaccctgaaaattcgaccaacaaaaatctaaactccaaaaatatgggctttcgaaaacttttaaattaattgcatcatgccgatcttgttcgcctattttatttggatttgattcgaaattcattaatcttaagaaaagaatagttaattaggaataaaccctaaaagtaaattggtaaaataaatataaattaaaataaagattaggtgtggatagaaataaataaaatattatcgcgaccatgtttggatcaattaaatttaaatgcaatggaacaagaattaatcctaattaaaaattcaaaaattatataaaaataatatatgtgtaatattaatcttgggcgaattcattagttgagattgcacaaatattgagtcaaatgcatatatgcaaaaattaggaattgtgaaatacactaaaatcgggacaaatagaaaaagaacactgttcattggccgccaggtgttcgacgtggccctatcccagcccctcctctgccctagctgtgccgagccccgtgccgctgctgctaccgcgccgcgccgccatcccatcgtcgcgtcgccgctgctgccgcgctgctgcgcctcgcgccgcgcgcgccctcctctcgccccgcgccgccgcgccaacgtcgccgcgccgcacgcccgtcccgtcccgctgccgcgccgtgcgccgtcgccatcgccgtcgccccgtcgccgtcgcgtcgcgtcgctgcctgtcgcatcccacctcgagccgcgcgccgccgctgccgccccgcgccgccgtcccgtcgccgcgcgcgttccatcgccgctgccgcgccgcgcgccgtctcgtcgcctcgcgccccgagccgccgcgcgcccgtcccctcgcgcctgtgccccgccgcgcggccgtcctgtcgtcgtcgccctgcgccgctgccgcgccgcccgtcccatcacgccgagccccgtgccgcagcgcgcgtcgcgtcgcctcgcctatcacgccgctcgcccgccgctcgtccgtcgccgtcgcctcgagcccctcgcgccgcgccgtcgcgtcaccaatagggccggccacccctccccgcgcccttataaaaccccaacccctccccttcaccaccccacaccatcccccaatctcttcccctcctccccatctcaaccgcgccaccgtcgcccttaggccgtgccgcgttccccgccgccgtcgcagccgccttgcgccgccgccgtagccgttgccgccggtaagccgtgccgccgccgccttttccccttgtccccagccggtctcggtcggtagaaagagggagagaggaggaaggagccgagggagagggagagagagagagaaagggcccgggagagaaaagaaaaagagaagagagaaaaaagaaaaaaagaaaagaaaagggagaaaagaggagagaaaaagaaaagaaaaaaataaatagaaattagagggagattagggaagtgtagaaaatttaaaataattagaatttgattatagaattaattatttacgaattaaacaattagatgaatccttgtagattgctatagatcatttttagtaatatctattggagatcaattcgcagtaaaaatttagatgtaattaaataaatataggaattatcataaattgttatagattatttttgggtaatccctataagtaatcgattaacggtagaaattcggatttaattactagggattttagccgtgtattatatttagtcatttagttgtagactaaattaagttgtataaggtttctaggattttgtccgatgtttctaacctattatatgggagaagatggagtattggaccatgcattttgacgggtcgaagaggctttcaggcactgcagcgggttgttctaatttcccctactggagaaagactgagctacgtattgtggatatatttttctatgtctcacaacgtggcagaatacgaggcgcttcttcacggactaaggattgcaatctctttgggaattcggcgtctgatagttcgtggagattttcagttggttgttaatcaagtcatgaaagagtggtcctgccttgatgataacacgaccgcctaccggcaggaggtacgcaagttggaagacaaattcgatggacttgagctcacccatgttcttcgacataataatgaggcaaccgacagactggctaattttggttcaaaacgtgaagcagctccttccgacgtgtttgttgaacatctctacgaaccaaccgtaccaaggaaagaaacaattgaggccacggacactcaagacgtaagtatgattgaagccgactggagagagcccctcataagatttctgaccaaacaagaactccctcaagataaagatgaagccgagcgggtctccaggcgcagcagactctatatcattcatgagaccgagctgtacaagaaaagtccatcgggaatcctgcaacgctgtgtgtctttggaggaggggagacaattgctaaaggacatgcattcaggcatctgtggtaatcacgctgctgcacgaaccatcgtaggcaagacttatcggcaaggttttttctggcccacagctgtgtccgatgctgataaaattgtgcgaacatgtgagggttgtcaattttttgcccgacaaactcatctaccggctcaggagctgcaaaccatcccgttgtcttggccgttcgcggttttggggctcgacatggttggcccgtttaaaaaggctgtcggtggttatactcatctctttatagctgttgataaattctccaagtggatcaaagctaaaccggtcattacaatcacaacagacaaagctagagatttcttcatcaacattgtgcaccggttcggggtacccaatcggatcatcactgataatggcactcaattcacagacggagtatttaaagatttctgtgaggacttcggcatcaaaatttgttatgcctccgtagcgcatcccatgagcaacggacaagtcgaacgtaccaatggtatggtacttcaaggaataaaagcgcgagttttcgaccgacagcatccctatgccggcaagtgggtagaacagctgccgtccgtactttggtccctgcgcaccactcccagtcgggcaacggaccagtcactgtttttcctggtctatggagcggaagcaatgttgccaagtgaggtggaatttgaatctctacgatttcgtaacttcagcgaggagcgctatggagaagaccgagtagatgacctcaaccgactagaagaagcccgtgaagcagccttaattcagtcggctcggtacttgcaagggatgcgccgttatcacaatcgcaatgttcgatcacgagcttttttagtcggcgacttggttttgggaaaaattcagactacacgggatcggcacaagttatctccctcgtgggaaggaccattcataatttccgaagtcactcggccaggttcttaccgactcaagcttgaagacggtactcatatcgacaactcttggaatattgaacatctttatcgtttttatgcttaggcattaattttgtatttccctctttgactgctaacatcaagttttttccttgagttatcagtcgggggctattataataataatggagtgtgatttttatcaattcaatttgcattacttgatttatcattgccttgtttgattttttggcttagtcaatgaggactgaaagttttttaacaacttttgcgggttttaggctcaataaggtttgacaaaagcttttaagaaatcaggagctaagtttgaaatatcaagcacagcataaattcatcagtattgtacaaattgtgcctccatcatcatcatcatcatcatcatcatcatcatcattgttgtaatacaacatcaatcagtatcagttttttcatcatcggaattattagatccggtcggccggaggtcgttgtcctggaatctctcaactacatcaacggctatcttatcggcagctttctgcgcatcattgatgaggtcaagggcggtttcttcgcttgtcctatctacaaagccatcaacggtgtcaatgttaattttcgggtacaaagacttggtcattgccaacgccaagctcgctcccatacttccaacttccttgattttcttaaaatatgtatccggagcaattctcagcttgtcgaagatttcggaagcatcaaatgtactcggaccattgttattgaagaacatggcttggacgagtggtgtagcggcgttggcgactttcatctctacctccctcaagcctcttaattttgttgaccaagacatcgaattgagcctgagatttgatcttgcgatctacataaatagatttatatcaacgagtgggcataaagaaaagaatggtttttaaagtattagttaccagtaccttcaacatctttcagagccaaatccctttgtcttgccaattcggccttgtctttctccagagcttggatccgcttttccagcacgtatatcttggcagcttgcactgtatcgcttcttgttggttgatatcacatagatggcagcataagtaagtcagacaaagattgtatttaccttttgacgaaccgcttagttcaaagttgaagtcttggagctcggtgatccggtctctcagatcatgctcagtcttcctggcaagctccttagcttcgtgcagctggtttctggtggcctcaagggttccaagatggggaactaatttctcaagagtcgcagtcttcgcctcgttcctgagatggattctctgcaatgcaaatttatccgtatttgagcaaagtggctgacaggatgattgaagctgtgtataagaagacttacatttacgaggcaagtagcttggccgagtgtctttttcagcagacatactttctcgtcctctttttctttatttattacgatcccctggggctgcatttcgtcatcccaccacttgactaatatgggtgggcgagaatcttcagccgattgtatccagaggaccacttcttcgtcgccgaccatcgggccttaggcattcatgaataatggtgaaacaattgaagaaagtctgtcggatcaaaaacggatttggaggattttcttacctgttatgatttcttgtcggggacgagcaggtccttgcaccctaataggggaattagttccagagttggcgccagcactcgtcttgtgacggctatcagcctgggtctctacctccgggatgtcattattttgctctgcgcctgactggtttccagtcgggggctcctgattagcgccaactccagcttcggccgactgatttccagttgggggctcgtcgctggtctctacgttgtcggttgctggttgattatcactcgggcgatcttcggcggtcggcccgatttcttttgtagggcccgtctccatgtcagtcggctcagagtcttttccagaaggatctatgtcagatggcttcctacgaatttgagttatgctatcagtgctatttcaacagtgagtgagcatcaatataaggatgatggctaaatgatttgtacctggaggacttcctgatttgcggcatgggacgactggatgttttcttcttcgggttagcttatcttgctggttttccagtcacccccttgcagctagctttttcagaatcatcattttcatcatcgctcagaaccaatttcctcttgtggaagtctgattggttggccgattgactggtgctgggttgagagtcagaccggatttttggtcctccgccagcttgaccagtttgccaacggggtgagcgccgttgagcagttggagggtctgacttcatcaaggcgaattcctgggcatgatgattcaagttttccatcaactttgtagatgataaaagcatgcttttgagaaagactggaattttaaatacataccggtggagggggtttgaaggcattgtatggcaccacaggcagcaagtgcgaatagctgactacgattgcatttgagaagatcttatacattctctccttcataaccttgaattcaagagattccagatcttcacggttagggtcatgcttgccgtcgaattcaaaggccatgcgagatctttctttgattggggccagccggctcttgataaaatgccgggtgatctgttctccttgcggaccttgctccttcagtttcagcatacggtccatcagggcaagcgcctgagtagcttcctcttccattggaagtgagttccaagtgtcttgataaactggaggaagacaggagtactcggggagtgcaggcttggggttttgtacatagaaccaatttgcatgccagcctttgtttgaggttttgaagggcatggagaaatacttttggctcagagttcccctcagttgaaatcccgctcccccaactacgcatggcttgttcttgttcgattggggtttgaggaagaagatgcgacgaaatagggcaaaatgtggcctgacgcccaagaaagcttcgcaggcatgtatgaagttggcgatatgaactatggaattcgagtttaggtgatgcaaactaatcccatagaactctaatatcccctggaagaatctttaggttggaagagaaaatccgccatagaagaaataagaaaataccatgacctcgtgtgtgtccggggtcggaaatgcttcaccgcatgctggacgccacccaatgatctcctttgctggaagaacgccgcgcgccaccatctccttcaggttctcctccgttacatcggagggcgcccactgactctcaaagctctctctctctctctcttccgccatggatgcgatctggatgatatgatttggttcggagtatggctaggaatgaatgggagattgatgctgtggttgtgtggaagattttcgtggagttttggaggatggattggggtgaatcggtgaaccctagtttcgccggcgcgactttgtactgtagcagagaatggggaaagtggcgagagtttcggcgtggaagacgaaacgacgcttggccttcggagttgtttcattagggtatcggaagtactaatgggcctgggcctaaacagtacttcagcccaattctgttatcggtgtggttaagttgtgatccatagggacttaggcatttttgcttcggcaatttttgctcacaacagtatggcccaatgctgttaaaatcctttttgacgcagttagataattccttaaaattactacgatgcaaataaagaggtacccgacagaaaggtgttatactacttttggaagcctttttaggctgcgaaggctgtttgggttttgttgagatgattggtttttaaacagtcattctttcagcatgttatatgcttattttgattatggcgtgagtcatagcctaggccacttcaactcattaattttcatgatatcatatttatatcacatttgatggatctttgagagtttttactcagattcttgtcatatgtgctgatttatggacctttggagtattttttactcgggcctctttatatcttcatttttggtatattaaagctaaagcagtcggctggatgttttattaagcgttgcatatgcttagctatatgatactctggatgatacggttgtaaaaccactcggatggatgttatttgcactttgactatatgtttagcttttagctactcagataatcggaggctacacctaattaggtgcatctattcgatgcacctgattatttatttttagcccttcactgtctttcattttggtactcgggagatcaatgcagaagaaattgaagcactcggattatcattttgtgctgccagaaaagattatttcatcgactgtaaaggtctcagcggctactgtggagattatggataccccatacctaaacggcatgtatggtccgactgggtatggggtgccatgtatagatagaatatctttaagaggactcgggttaaattctaaacttgtatgtcaaggaaatacccaagatcctagtcggttacgattgtattttatctgtaactacatattccgttagggatatggactgtattttgtaatacggaccccttcccctatataaggaggggtccgagtgcctctaggggcacgattttcacccagatcatacgatcaatagcatactcggcggatcaatccacggacagaagtagggtattacttcttgattaagaaggcctgaacctgtataaaataccttgtctcttaacccatccacttttccagcttgatagccacccccttatagtattgccgaaatcttgtttcgacacctccctctctccaagctccattttgcagcaatggctcgggctggagggggaagaagggatatataaagttggggaactttagtcccggttggtgttagatgatctttactcacggttggtgtaaccaacgggactaaagttccccagctccctgacaggggtctgacatgccttgtcagggggcgaaccgggagtaaagatcacttagccccgttggagtaataaactgggactaaaaaacctctttagtcatggttctttttggaaccgagactattgtggtttttggccgacctagcaaaaatcacacatacgtatacacatggatacacatacgtatataatatatatatatatgtacatttatacgtatacactttattttatgaacaatatatacatacacaaaaagtttgtattaacacatatacaaagttggtatacgcacgtatacaaagtttgcacatatacaaaatttgtatatgcatgtacatatttaaaaaccaaaaaataaatcaagaaaaaaccaaaataaccatgtatacaaactctgtatcatgtatacaaactctgtatatgtagtatacaaactttgtatacatacgtacaaatatatacatgtatacaaactttgtatatgggcgtatacaaactttatatacgtgcgtaaaaatatatacatgcatataaactttatacacgtgcatataaaaactttgtataggtgtgtatacaaactttatttacgtgcgtaacaatatatacatgtatataaactttatacatgtacatatacaaactttgtacatgtgtgtaaaaaaatatagatgtatataaactttatacatgtatatatacaaactttatacacgtgcctatacaaactttgtgtacgtgatactgaaaaaccgaaaaaggtagagaaaaaaccgagaaaagacggaagaaaccaactgaagaaaaacgagaaaaccggaaaaaaaacaaaagggaagaaaccaaggaatataacgagaaaaccggaaaaaaaaaaccaaaagaaaccaacggaaaaaaaaaaagaaaacaggaaaaaaacaaaccctacctaactcctccgcgcgcgcgccacgtggcgcgcgactagcggcgtattagcgttttctcaacccaacagggtgatagcctgataggcctcagtttttgtgatgacaatagcctatgatcattcctgttcatctgtttgtgtctttgagccgatggcaattttgtcgaaacatgaattcggcaataataaaagggggtagcgtacgagacctaaagtggatggatgcagagacaaaggatttagacaggttcaggccctctcgatgagaggtaataccctactcctgtttggggatttgaatccgccgggtgtagtatagatctgacgatcaggttgtgtcatctgcccctagagggcctcctgcccaccttatataggatggggggcaggattacaagatagaaaccttaaacaacacggtatcggtttcctaaatctactttacaatcttatcaagccaggactttaggccgttccataatatacagggaaacgtaatacccaagtcatgatctgttacatatttcatagatataagttatcccatataactagtcggataaccatgccgtatgggtatggggtacccataatctccacagtagcccctgagaccttcgcagtcgaaaagataatcttctctcgaaccagattactccaaagccgagtgcttcaatcatctttgtcatggtctcccgagtacttttaccaaatctgaagactgtggagggctgaaaaataaagtcaggtgcatcgactagatgcacctaataggtgtagccctcgactatgcggttaagtgaacaaaccaagcatatagtcaaggaataaataatccaaccaaccgagtggcttcgataattatagttaaccaagcgacttgatattaatatgtagcatatgcggtgtaaatccctgaataacatgatccgagtgatataccgactgctttgtaaaatatgatgagtgtaacctaaagttggctacattattgaaaattcacatagcaaaacagctataaaaaagcttgtatgttgtgaataaagaaatttccaaagtattgggcatacgccatgcgcacactgctttaacagatgtgcttaagtccctagaagacacatggttccaccacacctggaaatatatggcatatgtggtataaaatccgagtaaataaactcataaaggatttaccaaccgcctgaaaaatgaccacaatatataatcagcctaagccataatattggtcaataaaaatgcacacttacgtggcaaaaagcaacgatattgtatccaatcaattgcttaaaaacccaaacagcaccatgactatattaaaaagtcagcggggcagctatataaagctttactgtttgacaccttttaagatgcattgtaccaactcctaaaaagttgagtaactgcggtataaaaggattttaaggtattgggcacttgatcatgcgcactttggcctaagcaaaaagtgcctaagtccctaaaagaacgtgacaggccacacctgaaaatatgggctgcagacatattaggcctaggccaaaaaatatgccttcgataccctttaaaggatgacgcatgtaacatgctcccgggtgatatagaccatgtgatctgagtgattatcccttatgggatactccaaaatagatataaaaattgaatcccgactggcgcaagtattcggttgataacccttacggggaataataaatagtccagtctttgagcatagaaaatagacccatgatcataaattcatgttgcatgtatccggaacaagtccaaattggagacataatacttgtgtttgaactagtaagcccctgagcatatagcttgtccttctgtcgtagtcacaattgtctattgatggtagcaatcaaaattactgaagtcgcatagccatggaggcgaagaaaccagtcagcgacagatagatcaactaacaatgaagatcaaaggcgatgacgaaatccatcaatcatgaagatgaagaaaatagttgacgatgacaaacgcaaccgacatgatgaagataacgatgtcggtgatccaatcaatagcagtgtagcaaccaatgataatgacaaagacgctcatcagcatttgcatagtaggtcaaccgtgaaggtgaaataataagtcggtgaagacataatcatccattagcaacagcggagatgtcagggccgatgaagcaaaggtgctggtgatgatgtcagtgacaataatccttcaaattaatgttatagctgttgtagatgcttcacttggagttgttgaagtagattgtctgctccgaagtaaagatgaagataatgactcctggagttgactcgttggctgattaattgattgctccatctttgacataaagcttgtcgaattttgagccatgtatttgtgtagcccccgactctttgtttagttgggaaacaactgaacatagagtcgagaattatagcttcttatcgtcgagtagtcattgcttgattgaagataagtgttgaagatgtccaagtagaaatccatgatgacaaagttgcattgccgtgatgaagtgacagaagcaaactggtagtgaagacgcgcaattgtgacgataaaagcgccagtcggcggcagacgtagacagcttgcgttgaagatgatgacgcatattagcggtgacggcgacgtagccaaccgtgaagaagatagcatcagtcggcgtcataacaggccagctatgcaggcggaaacaccagtcggcggtggacgaggcggccggtcggtgaagacgtagacacccaacaacggcggcataataggccagccgtgcaggcggaaacaccagtcggcggcagcgaaggcaagccggtcggtgaagacgtagacgcccaacaacggcggcataataggccagccgtgcaggcggaaacaccagtcggcggctgacgaggcggccggtcggtgaagacgtagacgcccaacaacggcggcataataggccagccgtgcaggcggaaacaccagtcggcggcagcgaaggcaagccggtcggtgaagacgtagacgcccaacaacggcggcataataggccagccgtgcaggcggaaacaccagtcggcggctgacgaggcggccggtcggtgaagacgtagacgcccaacaacggcggcataataggccagccgtacaggcggaaacaccagtcggcggcggacgaggcggccggtcagtgaagacgtagacgcccaacaacggtggcataataggccagccgtgcaggcggaaacaccagtcggcggctgacgaggcggccggtcggtgaagacgtagacgcccaacaacggcggcataataggccagccgtgcaggcggaaacaccagtcggcggcggacgaggcggccggtcagtgaagacgtagacgcccaacaacggtggcataataggccagccgtgcaggcggaaacaccagtcggcggctgacgaggcggccggtcggtgaagacgtagacgcccaacaacggtggtgtaaccaaccaaccgtataggcgaagacaccagtcggcggtggacgaagcggccagtcggtaaagacgtagacgcccaacaacggtggtgtttccaaccaaccgtataggcgaagactccagtcggcggcgacgacggcgagccggtggtgatgttctgactgatccattcctggagcgtaagagataagcttaaagccatgaatcccttttatgcatatttggatttggatcctgcagaacaaacatataggatgagtagtatctgatgtaaatacaatactcgagaaaaatgctagtattttaaaatatttataaatatgtatttctcctcttgtcaattttgatttccccgagcagatgactccatacgtttaaacactctgcccgactagtcatagtccccaagcatcgggagtcggcctattcatttcccaaacatgcatatgagtgacatgagttcgtcattaatggaacaaagtttcacggctcagaatttactacttaggtacttttgcaattattaagagcagaaaataaatttatctcatctctatgcttttgatttattccgaataatacttagcaccttgcgttactcggtccatccaacgagcccccgggtgctaggaatcggcccaaaggcaaccatccattggcaaaccaaacggaaagcataggaagatagaactccataactcgataggtacttttgtactcagattatgtcgcaagcaatcaagataaatattatgaaaattgtttaaaaaatacgatataacatctatagcccccgactcactagtcaacggcgaaccagttgatgtagtgaggcgaaggaaaagacaaaatatcatataaagaataaaataaatgatgacttagctttgtaatattccctcggtgacagcaaaagtaaccgatgtgggaacgaagcagtccatcaatggtgacaaaaacaccagtcggcgccagtggaaccaagccagtggtgtagatgatgaagcccattaacagcggcgaagtccgccaaccgtataggcaaaaacaccagtcggcggcggcgaaggccagccggtcggcgaagacgtggacgcccatgaacggtggtatgaccaaccaaccgtataggcgaggacaccagtcggcggcgacggaggcaggccggcggtgaggtcgtagacgcccaacagcggcggcataataggccagccgtgtaggcggaggcaccagtcggcggcgacggaggcaggccggcggtgaagtcgtagacacccaacagcggcggcataataggccagccgtgtaggcggaggcaccactcggcggcgacggaggcgggccggcggtgaagtcgtagacgcccaacagcggcggcataataggccagccgtgtaggcggaagcaccaatcggcggcgacggaggcaggccggcggtgaagtcgtagacgcccaacagcggcggcataataggccagccgtgtaggcggaagcaccaatcggcggcgacggaggcaggccagcggtgaagtcgtagatgcccaacagcggcggcataataggccagccgtgtaggcggaagcaccaatcggcggcgacggaggcaggccggcggtgaagtcgtagacgcccaacagcagcggcataataggccagccgtgtaggcggaggcaccactcggcggcgacggaggcaggccggcggtgaagtcgttgttgttatcagcaatggcggtggcgaagacaagccggcaaagtggactcgcggccgatcgaccggaaagctgagacgcctcgactccatgaccagcattaatcgcctcaatagtgccgcgtaattatatgcgaacaacaaaaaataacaagagattaatctgagattaaaaatcaatatgataaataatgataaaactaggcgtccggcgctggacgagtagttagcatgagtagatataaaaaaattgctcaatggaaaatatcacataaagaggaaaaataaaggcacttagcttttttctcagtgtcctccgtatatatgtgttaatgggtggacaggagatcatatcggcagcttgtgacagacatgcaatacatgcatgagtgctgcacttccctgcgtgaaaattgctcctattgattggctcagattccatgtcgactccaatttagattagtaattgaatatcgccaggagatttgacatcatcagatgatggactcggcatgtcaaacgatcaagttgacgactgacgtcccgtcggaatttccggcggcagcgatgcaagccgaactccagaagaaaagaaccggtccgaagacgaaggcggtgctgacggcagccataggagattgaatctgaaacttgccgcggtagattgttgtaatccctcgattgagtttccccctgactgatttggatcaagtcagagaagaggagcttgaagaagtggtcgacggaaaggaagtgaaaactcccgaagcgaaaacgaagtcggcgactcatgaagttaattccatcgcgctcgttgataggaaactcgacgcaacccctacctggcacgccaactgtcgaaacatgaattcggcaataataaaagggggtagcgtacgagacctaaagtggatggatgcagagacaaaggatttagacaggttcaggccctctcgatgagaggtaataccctactcctgtttggggatttgaatccgccgggtgtagtatagatctgacgatcaggttgtgtcatctgcccctagagggcctcctgcccaccttatataggatggggggcaggattacaagatagaaaccttaaacaacacggtatcggtttcctaaatctactttacaatcttatcaagccaggactttaggccgttccataatatacagggaaacgtaatacccaagtcatgatctgttacatatttcatagatataagttatcccatataactagtcggataaccatgccgtatgggtatggggtacccataatctccacaaatttccacttgttttcttctatctccaaaagcagctcgcgcggttgctacgacggttcgacgaaaatcctgcaacgcgctatgacccttctaccagcttccaggatgaaccggtgatgaggatcgaggatcacttacgcgccaaattaccagctatataaaggcgaggccatagaagcaacggtaaaaatccacaccggcgcccaacggcaaccaagttggatagagccaccttaatttgtagacgactagtgggagtagtgccacccagcctgctgcagtgcgcattcatggcgtcatctgtggataagtgggtagggctcgggtcggccatggccggcttcgccttgctttggtccagcctgccggaccgcgtgcatgacgaggctaggcacaacatcactagtttgtgtccaatggtgattgcactggtggagaaaccctttgtagtcccggttcgtaacccccctttagtcctggtttctaaaccgggagtaccaatccgggactaaagatcgagctgacctttttttttttcatggccctgttgctgcatggtttatatatataaatatatataaaccatgcatatatatgtttcaatacatatatatgcatacatatatatgtgtatatatatatattatattatattatatgtatatacatgcataatatatatgtatttatacatatatatgttatgcaaatgcatatgtatatagatatatatatgaccaaaatatatttacattataaaaaatgtgtacacatgcatatagaaacatatgtagtcatgtattaattacaatccattatatgtcctagctagctacgatttcgacgtagtagtagtcgctgctagctcagaagctaaggaccggtgaattgtgtttccgtcgtagtagaattcacccttgggatcaaggatttcttcgttgatgaatcccatgagttgttcttgaaccgctgcgataaattccttgtgtgtggtcaggttatccctcatgcgaataaactatatgaatgtatgaaattgattagtaattaaacaagaaatcgttacgtaatgaaattttgaatttatttgtacgtacatcgagctctcttgtggtgatgatttggtctgcaaggcagtggcaatactcacacacgtagtagccgcacaagttagttccctgcttttgctttgcgcactacaaataaatgacaaattaacggcgtgagatctaattaatatacagttgtatgtattaatttgaatcggagaaatataaatgtagagcatgtgtactcacaggaaatttgaacttccgcctaagtctttctctccatttgccgcggaccaaatgacagaaccgataccaagccctacatagagtttaaagctatgattcgtagtagcaattaacataacaagattttcttaattaacagaggaacttatgacggtacctgtctataagttcgaaaaccttgtcaaacgtagactcttttttatccattgagtcatatacgttgacggtgcaagccgacaggtcgaagagaaaaagcacccagtggaatctgcaatgtgcgtgtgtcggtgacatgggatcgggagtatcatgactagaggtttgaggcagacacaatcgcccacgtggcctggcaccctcgggggacgtcaagcccgaaggtggtgtgttcgccctcctcttagtccccccgagggggtcgggctgcacccccctcggccccgagggccgaggcgccccgacccctcgtgggttttcgctccgcgtgtatggggtaggtgagcacagtggggctcacctaaccacatttattgcggcttggctgagcgtgtcacgacgcatgtaacgtagtgcattgcactcatttatccggtctgtgaccagtcacagaccggtcagatcgcgggattaggtggcgacaggcggtctgacgcacgcctcgccccatcccgtcaggacgagggcttctaggcgctcgtccccagctggagctagcgtgttacctcccagagatggcacgttagtcctgatcagatatatgccaggcttcatcctaaccattacaggcaaaatgtagtgtgaaggagggccaacatgcagattgctaagctgacacgaggtggacaagaatgaccgatttgtgaccattctgacaccggtcatgtcgccagcagacagccatgattctacgtcgcgcctgctcccggcgaaagtggaggtaggtgcgggccgtcccatcagaaggtgactcgaacggcaaccatgcagatctccgtccatttatgaaaaggtagggtaagtccccataaaaaagggggggatggtgcatgtggtatccccttaagatataaaaggaggaccttgcccacggagagagggggatagattttagagagagctttttcttggactggacctttccagattaggggcccagaacaagggagaggcgggctgatactttatagctctttgatacacagatctcccaaaaacacaggagtagggtattacgcttctcagcggcccgaacctgtatacatcgccggtgtcttctgtgcttccggtctcgcgaaccttccacatacagattgggagtttagagtctcacccagggtccccggccgaaccggcaaaggggggccagcgcggtctcccggtgaggagccccacgctccgtcatctggcgcgccaggtaggggactctgcgagtgatcttctgagctcttgcgctctttcgtgggcaccaagcttttcctgttcagccccatggctgagcaagcaaagccgcacgacctctctccgagtgtgagtggcgacgacggggagccgaacccacgccgtcgagctcgtactccgccgccccctccacgccaaagtcctgggcgggagaaggcgcccgagtgggctgaagggtccgcgacttcgacatccacaggaggtggaaaagggcggcgagatggggagcgtcgcctcctcgtctatggtgacagcagcacgccccagggcgcgctccaagctgcgggcgcgctcctacgtcacccgcctgtcgcccatgacccggagtctccagcccaacgatggctggacgatgtggccaaattggtcatgactgcgcggcagcgcctagatgctggtgggcggtcctccgccaccaaggcctctggtgctgctaccaccggctccgcgtcgtcaagacggaggtcacgacgagcggcagccgctgttcgccgttcggccgccactccttcgtcgactccttcgacccgggaagatctgcgtggggggccggacgcccgcgccagcatcgagcgccggcgtaatgaccgacgtgctgcccacgcaacggagggctcttcctcgtccagagtgtcacctcgacacggacgcggggaccagccctccgttcccccggttggtggtgtcggctgtagagcctttgtggcgagtcttcggaatgtccgttggcccccaaggttccggcccaccatcgccgaaaaatatgatggcagcgtcaaccccgccgagtttctccaggtctacacgaccgggattgaggccgccgggggtgacgacagggtcatggcgaatttctttcccatggccctgaaggggcaggcgcggggttggctaatgaacttgccacctgcatctgtccactcttgggaggatttgtgccaacagttcaccatgaacttccaaggcacatatccgcgccccggtgaggaagcggacttgcacgcagtacagcgaagggacgatgagtcacttcgatcgtacattcagcgattctgtcaagtccgcaataccataccatgcatccctgcacacgcggtaatctacgcgttcagggggggcgtgcggcacaaccgcatgctcgaaaagatcgcctccaaagacccccagactaccgcggagctttttcagctcgcggaccgagtggctcgtaaggaggaggcatggacctggaacccctccggttccggagtggcagcttcggccgcccccggatccgccgctcagacagggcggcgtgacaggaggaggaagaagaggtcagtccattccgacgacgagggtcatgtcctcgccgtcgagggcgcttcgcgggccacccaaaaggggaggccagcgagcgacaaaaagaaaaaggttggcgctcccagcagggagcgcccagccggcaagtggtgcaccgtccacaacacttcccttcacgacctcgcggactgccgtgcagtcaaaagtttggctgagcggacgaggaagtgggaggaagagaggaggcaggagcgccgagagggcaagtccccggcggttccttccggcaatcggcgaagtgaggccaagcagaaggcccccgccgaggacatcgatgacggcgatgatgacctaggtttccaagagcctggggccaccattgccactgtcgatggaggagcgtgtgctcacgtttctcgccggagcctcaaggccatgaagcgagagcttctggccgcggcccctactcatgaggcgacgcgccgggcgcggtggtcggaggttgccctcactttcgaccagaccgaccacccaccgtgcgttgcccggggagggcagattgcgatggtggtttctcccaccgtttgcaacgtgaagttggggcgagtcctcattgatggaggagcagccctcaacatcctttcccccgcagcctttgatgccatcaaggccccggggatgatgctccggccgtcccagccaatcatcggtgtgacgccggggcacacttggccgctaggtcatatcgacctcccggtcaccttcggtggacccgccaatttccgcacagagcgggtgaacttcgatgtggcggacctcagtctgccctacaacgcggtcctggggaggcccgcgttggtgaagttcatggcggcggtccactacgcctacctccagatgaagatgccgggccccgatggccccatctctgtccatggcgacctcaaagtcgcgctcgcttgtatggagcagcgcgcggaccgcctcgccgtcgtgtccaagcccgagggtggcgacgagaggcttggcacatccacccccgccgccccgaggcagcggatagtcacgtgcgatgaggtcccggtcaaggaggttgtcctgggcgacggcccgtccaagaccacacggatcggtggtctcttggatggcaaataggaagacgcgctcgtctctttcctgcgggcaaacgctgacgtcttcgcatggaaaccggcggatatgcctggggtccccagggaggtgattgagcaccgtctcgccgtacggccgggcgcaaggccggtccggcagaaagcgcggcgccaggccccgaaacgtcaagctttcatccgcaaggaggtggcgcgacttctggaggccggattcatccgcgaggtcatccatccggagtggctggcgaacccggtggtcgttcccaaggcgaacggcaagcttcggatgtgcatcgactacaccgaccttaacaaggcatgtcctaaggatccttaccccctgcctcgcatagatcagattgtcgactccacagcggggtgcgaccttttgtgttttctagatgcatactctggttaccatcagattcgcatggctagggaggatgaggaaaaaactgcgttcattacccccataggaacttattgttatacgacaatgcccttcgggttaaagaatgcaggtcctacttttcaacgtactactcgaatttctttgggtagccaattaggacataatgttgaggcttatgtcaatgacttggttgtaaagacgcgtaaccaggaaacgttactttcagatctagcggaaacttttgagagcctccgctccgcccgcataaaactgaaccccgataagtgcgtgttcggtgtacctgcgggcaagcttctcgggttcttggtctctgcccgaggcatcgaggccaaccccgagaagatacgagctatagagcggatgcgcccccccagcaagcttagggatgtgcaatgcgtcaccggttgcatggccgccctaagtcggttcatatcgaggctgggagagaaggcgttacccttgtttaagctcctcaaatgctccgggccgtttacttggacggaggaggctgaacgtgccctcactcagttgaaggcgtatctcagctctcccccagtactggtcgccccggagccaaatgaacccttgctactctacttagcggcgaccccgcaagtggttagtgcggcgttggtcgtggagcgcgatgaggacaatcctcattccgcgcacccccaccttgtgcagacttggcccgggagagagaagggaggagaggcccccgagccgaacggtggcccaaggcccccgacgaccggagatggccctctgcccgcttgtcagacggtgctaggagcccccgacccccaggaaggccccgaggccactgcgggaaggccgcacctatcgccctctgaccccgaggctaaccctgtgccaatttggcccgggagagagcagggaggagaggcccccgagccgaacggaggcccaaggctcccgacgaccggagatggccctctgcccgcttgtccgacgacgctaggggcccccgacccccagggcggccccgaggccactgtgggaaggccgcccctgtcgtcctccgaccccgaggtcgtcggcacagaagacgagtgcgccccgcgaggccgctcgggtgaagagcgccccagggatgcggcccctagcgaagaggatcggccccaccgaaaggtgcagcggcccgtctactttgttagtgaggccctccgggatgccaagacccgataccctcaggcccagaaaatgctttacgctgttctgatggcctcgaggaaactgcgccattatttccaggcgcatcgggtcactgttgttacgtcttaccccctcggtcaaatcttgcataatcgagagggtactggacgggtggtgaaatgggcaatcgaactttctgagtttgatttgcactttgaaccacgccacgctatcaagagccaggccctcgccgactttgtggcagaatggaccccggctcccgagctcgtctcggtccccgaaaccggctcgggtccctcgcagctgcctcacaccgctcactgggtgatgcagttcgacggctccctgtctcttcagggcgccggtgcgggggtcacattgacctctccgagtggagccgtcctcaaatacttggtccgcctcgactttcgagcgaccaataatatggcagagtacgagggactccttgccggactcagagtggcagctggactggggatccgccgcctcttggtgttaggcgactcccagctggtcgttaaccaagtctgtaaggagtaccggtgctctgactcgcagatggacgcctacgtgcgccaagtacggcgtatggagcgccattttgacgggattgagcttcggcacgttcccagacgggataacatgatggccgacgagctctcacggctcgcgtcctcgcgagcccagaccccaccgggcgcctttgaagaaaggcttgtccagccatcggcgcgacccgaccccttaggggagacggatgcgcctgaccggcccccgaggcccgtcggagtccaggcctcgggacccgaggggagtgctcccagctcccttagattgattgcttggatcgccgagatccaagcatacctcacagataagactctacccgaggaccgcgaagggagtgagcgcgtccatcgcatctccaaacgctacgtactggtagaagggaccctctatcggcgcgcggctaatggaatcctcctgaagtgcattcctcgggaacaaggcgttgtgcttcttgccgatatccatgaaggcgaatgcggagcacactccgcctcgcgcaccttggttggtaaagcttttcgccaaggtttctattggccgacagctctcaatgatgcggtcgacctggtccgccgatgtagagcgtgtcaattccacgccaagcaaatccatcagccggcccaggccctgcagaccataccactttcgtggccatttgctgtctggggactcgatatcctgggaccgtttaggcgggccccgggcgggtttgagtatctgtatgtcgcgatcaacaagttcactaagtggcccgaggcttatccggtcgtcaagatcgataagcactccgcacttaaattcattaagggcatcacggcccggtttggagtgcctaaccgtattattacggataatggcacccaattcactagtgaactcttcggcgactgctgcgaagacatgggcatcaagctctgcttcgcctcacctgcccacctcagaagcaatggccaagtggagcgctccaatgcggaaatcctcaaaggtcttaaaaccaagaccttcaacttactcaagaagcacggcgtttcatggatcgaggagttgccagcggtgctctgggcaaaccgaactacaccaagccgagcaaccggggaaacgcctttcttcctcgtctacggcacggaagcggttctcccatccgagctcaccctgaggtctcctcgggccaccatgtactgcgaggctaatcaagatcagcttcgcagagatgacctcgactacttggaagagcgaaggcggcgcgaggccctccgagccgcgcgctaccagcagagcctgcggcgctaccatcagcgtcacgtccgggcccgatcactctgcgtcgacgacctcgtcctacgccgcgtccaaacgcgtgctggattgagcaggctctcaccaatgtgggagggtccgtatcgagtggtcggcgtcccccggccgggctccatacggctggccacgggcgacggcactgagctgcctaacccgtggaacatcgaacaccttcgtcgcttctacccctgaggggggagttgggtgtcaggtttcgggctcgggccaaccccgcaccccctcgggcgtgcagggttggccgggggctgccacacatgcactttcttatttctcttatttcagaatttcaataaaagcagtttcaatttcctaaaggttgtatctgtgctgttttttccttttgaagaatcttgacttgaaatagatcacttgcgctcaatcctgccctcgggggctcgggtcggctaaaaatcgccaaacggggcccagaaccgagccgtgcctcggggcgtggtgaactccgggggggaatcggcaaaaacccacaatcgggtcacccataaccctcggtcaccacgttcccggcctggccagtctcgacatgtggatctccctaggcactgtcacgtcctgataaattcatcccgaaataaaattcattttctaaaaggaataatagaattaattaaaattcgaaaagaaattggcaaacactaaaaatacgtacaagaaaaattcaaatgtggcccggagaatttttgttaaattccccttggtctaaaaggagccctcaaaatttacttgaattttcagagcaccggaaataattattaagcaacaaaaacaattaacaaagtttattaaaaagaaaaacctaaaaataatctctcttccttctttgggccaagcccagcccaaaagtctccctttcctccctctttttctctccctctccttctctccctccttctcttgggcctcctcccctcccggcccactccctcctccctctctctcccgggctgccttttcccccccctcttccctcccggcctgctcggcccaggccgccttcccctcctctcctcctgggccggcagcccggcccaaccctagccgcgcccccgcccgtgcagcgcgcgtgcgcgcgctgatgccgccgcctgaccggtgggtcccacgcgccaggccgggcgtcgtccccttcctcccgcccggccgtcctctctccctctcccgtgaaccctagctcgtttcctcctctaaatccgctcgattcaagcacgggattcccaaattaaataggggaaattaatccccattgactcctcttcatttccccctaatttcccccttgaatgccgcccccaatcgccgggaacgcccgcgttttctccggccaccaaccattgccgccggccgtggttctcgccgccgttccgacctcccccgtggccggttccctcccccatcctataaaatgggatcctcatcccccgttctctcgttttagccccatcccgagcctccccgtggtccctagctccctccccaccgtcgccctctctctcccacgttgccggccgcctccagccgcctgtgccgcctcgaccgtgcgccggccggccgcaccgtcgcctcctccagcatcgccgccacctcctcttcgccggcctgccctccgtttcgcgaggtgacccccggagctgccttctccccgtcgccctcctcttttctccgcgccggccgcctccagtcgcctccatctccctgcctgcacgccggtcgacgtcgccaccacctccctcggctccacgacgccgctctcatccccggcatcacctcctcctcgcccgaacatcgccggaacaccgtcgcccgcgccggcctcaccttcctcctcgtcgacatctcctccggctgcccctttcgccatgcccgtgcatcagccgacgctgccgtcccctccctcggcatggtgacgtagccctccacctcgtccactcctcggtttcgccggaacgccatcgccgcgagcctctccatccgcctcgccggagttgttcggccgcccgtccctccacgccgtgcaccggtcggccacacccccatcatcttcggcatcgcagctgcgacgtcgtcctcggcctcgcctcccctccgaccgaacaccgccggtgtccgtcgtcgtcttcaccgttccctctcgccggctcgtcgtctcgcggcgccgcctccgtcatcgtcatcatagcggcgtgttccacgtcatcctcgaccccgtgcagccgctgccggctgtcctcgtcgcctcctcgccggtcccggtcgtcgtcgtcgtcgtcgtcctctcgtcgttcccggtcgtcgtggcgttcgtccctccgtcgagccgttctcgtccgtcgtccgcgttcgtcaagcaagccgctgcagccccgtcctcgtgttcgtcctcggctccgcgtcgtcaagcctcgtgccggccgcgtctcgccttcgtccaaggatcgccgccgaagccgtcccctcgccgttcgtctccgttgtgcccgtctgtctccgccgcgcccgttcgtcgttgtcgttcccacgcctcgtcgcgtggtggtaaggttccctctccctcgctgccctgtcctcgtcctttcagtgtcgcccgtgcccgttgtgcggttgtcggccccggtacccgtgtatcggcgtcggcagtcgttcgcttgtgcgcgtggtgaccgtgttagtgtgtccgctcggtagccgcgtggtttccacgtgtgcagtccgtgtggtgtctagtggagtccgtttgtcggccactcgcctcggttgacacacgggatccgcttccatcgacccgtggaccgtctctgtgtactcggtctaccgtggtcctttttgttgacatgtggggtccgcatgtcaacggcgcagccttcctgtcttttcccaggctagcgcttacacatgttttataattgcaaagcttaattataataatccgcaaatctccatataacagcattaaacttcggatgatcatatcttggtcatacgaactccgaatcgacccgttcaagtctcttaatgtttgttataacctaaagaacccggtgctttctttttatgtactgttattgcttctttataggcttgtagctttgcttgtgtgcttcgcgtagcttctgtcgttccggaggttcccgaagcgtggttcgcggtcgtcgccgaaggttcggaagtccgttctctctgagcaaggcaagtcacatcatccttgagcatattgaatcccagtttataaaattatgttgatttaaattaatgcattaccgctttatttaaattcccgcgttatcactgttttatttagccatgcctatttacctttgttatgaccttattattgctattgttattattattcccttgttcaccctagattaaacaaaacctcaactagtgggtactctattcatggttccactagtatgaatttaggtagatgcttcgctgtttgaattagacaacattaggtggtttcacaactttagacttgggaaattctcatatcatttggacactatggaatggttggcttatgttggaattggacacacacctctcttcctctttcaaaacccctaaaacctgttttcggtggggtttgggtgcatgccagttgtgggaagtagcaccccggccactataaggattaagctcgggcctctgttgcaaagcactaccgtacttccacatgtctaatgggtaaggcttagtttgtggctcagtctagtcataaacaaaagtacacggattggagatggatgaagtcgggtgtcgatggacattctccagggcaaatgaaggctacacgagctgcggcccggtagtcgagatgtcatatggcagagggttggtgccctgctgctaggggctcagttctgcctgcctgtcccgggtatcccggccgtaggtgggattgggtcggtactcttgtctaaggctaggatgggttggaaactatgtcacgtcttccgtccgtataccgtggtggtatgtggcgcgtggttacacgtgaggaagatgtgtcttgtgggtaaagatgtacacctctgatcagagtaaatctattcgaatagccgagccctcggttatgggcaagccgagcaatgtacccaagtcagtgttttaattcttaaaatttgctcagcaactaaaatgtggaatggttggcctgggttggcttgggacgagctgggacccagggtcgggttgccagttcggtctgaatcatcgtaggccttgggttaaggcaggttcgtgagggttcacggccttgtttaataatactgtgtagcgctaggatcgtctttataaaatggctttgggcaactaagtgacttttaaatgctgtttactgcaaaacttaaaccctatattattacccccttgtactcctttgcattaattgtgcatctccgttgtggcttgctgagtactgtggttgtactcattcttgctcaatcttttcccccttcagtaagagaagctttggagaagaagtcttaggtggagtcctggcttataccccagttgagcgcctgtgaagatggagccgtaggcccgctagtccgctgctgtttatttttgattgtcaggcctgatgcgcctttgtaataatgtaaatattatcgatataataaagatgtgtcttttatatcatgtttgtgtggtgtaccccggcttttcctgggacggggattaatacactagcgttcgggaaaaggcaattttcccggtcgcgacaagctggtatcagagccatctcgactgtaggataagccaaatggataaaacctaaggacatattttataaataaaattatttgcgaaagttcctctttttctccttcccctaatgctatttgcaaaagggttactcttttctttcttcggatttcaactaagtactagatggtcagctttgcgaagaagaagatgtcgtcagttgtttgccgaagctccggaagactgcaggatccgccagcgaagcgaaggaagcagtgaagccagctgtgaagcaggagtgaagatcttggagaacccgtcgcagaacctaagccaccctctagggtagagtcgtttgtcgtgtgtttccttgcttgtgtgtgtagcgcgtggtttgcatcggtgggttgtgatgtaaccatgctaggttgtttgcttaatcaacttgcagaataagcaaaacaaacaacacatcaacaaaaagagttagttcctttaaggtcctgtccctagctctggtctattctttccttgtatgcttcccctctcaacctctaccttgtgacagatggataatactggtaacaaaggctatgggaatgatggatccgatgactcaagaacccaagccaatgggaatgagagaagcatcaacgaaacctcaccagagctaatccaagttgtggttaaccaaaccaacatgttggcaacagcctttcaactattacagaattggaacaacccagcagaggcaaccaacgttcaagtacctacagtccaacaacagtgcaagttatcagaatttctcaaaactgagcccccaacctttgccattgccgtcgatcctatggaagccagtgattggttgcgcacagtcgagaagaagctagggttgattcagtgtaccgaccaggagcgggttggcttcgcaactcatcagttggttggaccggcctcagagtggtgggatagctacgaagcatcccggccagaaggacataccatcacctgggacgagttttcatctgtattcaagagatcacatgttcccgcaggaatgatcacactaagaaaacgagagtttcgctacctgaagcaaggagatttgaccgtcacagagtacctgcatgagttctatcgtttggctcactatgcaccagaagatgtggaaacggatgaagacaaacaagagaagtttctccaggggttaaaagatgagctcgcagtgcaactacttctagaggattatgaagattttgagaaacttgtggacaaagccatgcaactcgaaagtgagcataatcggatgacgaactgcaagagaaggatggttaacaacccagtatttccaggtggtaaccaaagacagcgcactgagccacttcagatcaccggatcttctgttgtgtatcaagagttcctgccccaagaagatgaacgcaatgcaggcaacaacaatagcaatactaatgatgatgataccaccaacaaccatggttcttgccccattagtgaccactcgaataaagcgtgccatgtcagtagcattcaccaagatgtcaacaatagtatcaatgatggcacccaaaatgacaaccctagtaattgggactctgggaaagactccaatggtgatagcaataatggtaccactgatgccaatgttagcaaggattcccaaccaccacttccaactccaagtcaaaatgatcgtccccagatggacagctcagtaaagaagacgttgatttgttacaactgcaaagaaccaggtcatttctctagagattgtccacagccgaagcgtaacctgcgccatcactccggccattatgcaagaagaagacaagtcactcgccttgtggtcactggagcaaacgccgtacctgtgaggcctcatgttaattctaacccatagtagatacaatgtaccgatgttaagcaccttccctttttgtttaaagcagtgcctcgtattcatgtaatatgggagaaatttgtaataaaaacaagctctaagaggattcttttggaagatgcggatatgtgatcatgtgtataattgtttactgacaaaggagacctagggtctcgtgccagaggaactatattctaacctcgagctaataaccaacctgaggatggaaaagaaaatcaagtgattaaccaaagagacttttgtttggactaagagtttcagatgtgtcttctttggatcaaaggcaacaaccgtcagtatagcttttggcaaaacactttaaggtttcactgaaaggcagcagaccaaaggaccacatcgtcaccagaagcatccacaactctcggagtgaagagtacttggttgacaaagttccaaagatgactgatagaagataccagcaaaggtgtttattatcgggcaaagaggtaggtcgaaaggtgattgataagagaaatcgggaaagaacacatcaaggtcaaagggtaaaggaatacgttgaatgctaactgaggacaacatgaagtgaatagtggtaagttagaagtaaatgacaagcatgatattctcatgataacaagcatggtatcctagtgatgacaagctgatatcgacgcataacgtgaagtgggtaacttgtatgaggttgacgccaaagatatgaattatgagaagtctggaaccgaagtcccatcttcaagtgccacaatccagtcgaagtcagctagaggtgcaaccagggaaaagtcaggtgaagagaagattccatctgcaacaggagattgagccaagcagtccagagtggagaagttttgctaggcaagtttgttataaaagatgcgacggaagaagtcggacaagaagagaagaccgcccaacctatcttctagctagcctcctcgaatctcggggacgagattcttgtaaggggggtggatttgtcacgtcctgataaattcatcccgaaataaaattcattttctaaaaggaataatagaattaattaaaattcgaaaagaaattggcaaacactaaaaatacgtacaagaaaaattcaaatgtggcccggagaatttttgttaaattccccttggtctaaaaggagccctcaaaatttacttgaattttcagagcaccggaaataattattaagcaacaaaaacaattaacaaagtttattaaaaagaaaaacctaaaaataatctctcttccttctttgggccaagcccagcccaaaagtctccctttcctccctctttttctctccctctccttctctccctccttctcttgggcctcctcccctcccggcccactccctcctccctctctctcccgggctgccttttcccccccctcttccctcccggcctgctcggcccaggccgccttcccctcctctcctcctgggccggccgcccggcccaaccctagccgcgcccccgcccgtgcagcgcgcgtgcgcgcgctgatgccgccgcctgaccggtgggtcccacgcgccaggccgggcgtcgtccccttcctcccgcccggccgtcctctctccctctcccgtgaaccctagctcgtttcctcctctaaatccgctcgattcaagcacgggattcccaaattaaataggggaaattaatccccattgactcctcttcatttccccctaatttcccccttgaatgccgcccccaatcgccgggaacgcccgcgttttctccggccaccaaccattgccgccggccgtggttctcgccgccgttccgacctcccccgtggccggttccctcccccatcctataaaatgggatcctcatcccccgttctctcgttttagccccatcccgagcctccccgtggtccctagctccctccccaccgtcgccctctctctcccacgttgccggccgcctccagccgcctgtgccgcctcgaccgtgcgccggccggccgcaccgtcgcctcctccagcatcgccgccacctcctcttcgccggcctgccctccgtttcgcgaggtgacccccggagctgccttctccccgtcgccctcctcttttctccgcgccggccgcctccagtcgcctccatctccctgcctgcacgccggtcgacgtcgccaccacctccctcggctccacgacgccgctctcatccccggcatcacctcctcctcgcccgaacatcgccggaacaccgtcgcccgcgccggcctcaccttcctcctcgtcgacatctcctccggctgcccctttcgccatgcccgtgcatcagccgacgctgccgtcccctccctcggcatggtgacgtagccctccacctcgtccactcctcggtttcgccggaacgccatcgccgcgagcctctccatccgcctcgccggagttgttcggccgcccgtccctccacgccgtgcaccggtcggccacacccccatcatcttcggcatcgcagctgcgacgtcgtcctcggcctcgcctcccctccgaccgaacaccgccggtgtccgtcgtcgtcttcaccgttccctctcgccggctcgtcgtctcgcggcgccgactccgtcatcgtcatcatagcggcgtgttccacgtcatcctcgaccccgtgcagccgctgccggctgtcctcgtcgcctcctcgccggtcccggtcgtcgtcgtcgtcgtcgtcctctcgtcgttcccggtcgtcgtggcgttcgtccctccgtcgagccgttctcgtccgtcgtccgcgttcgtcaagcaagccgctgcagccccgtcctcgtgttcgtcctcggctccgcgtcgtcaagcctcgtgccggccgcgtctcgccttcgtccaaggatcgccgccgaagccgtcccctcgccgttcgtctccgttgtgcccgtctgtctccgccgcgcccgttcgtcgttgtcgttcccacgcctcgtcgcgtggtggtaaggttccctctccctcgctgccctgtcctcgtcctttcggtgtcgcccgtgcccgttgtgcggttgtcggccccggtacccgtgtatcggcgtcggcagtcgttcgcttgtgcgcgtggtgaccgtgttagtgtgtccgctcggtagccgcgtggtttccacgtgtgcagtccgtgtggtgtctagtggagtccgtttgtcggccactcgcctcggttgacacacgggatccgcttccatcgacccgtggaccgtctctgtgtactcggtctaccgtggtcctttttgttgacatgtggggtccgcatgtcaacggcgcagccttcctgtcttttcccaggctagcgcttacacatgttttataattgcaaagcttaattataataatccgcaaatctccatataacagcattaaacttcggatgatcatatcttggtcatacgaactccgaatcgacccgttcaagtctcttaatgtttgttataacctaaagaacccggtgctttctttttatgtactgttattgcttctttataggcttgtagctttgcttgtgtgcttcgcgtagcttctgtcgttccggaggttcccgaagcgtggttcgcggtcgtcgccgaaggttcggaagtccgttctctctgagcaaggcaagtcacatcatccttgagcatattgaatcccagtttataaaattatgttgatttaaattaatgcattaccgctttatttaaattcccgcgttatcactgttttatttagccatgcctatttacctttgttatgaccttattattgctattgttattattattcccttgttcaccctagattaaacaaaacctcaactagtgggtactctattcatggttccactagtatgaatttaggtagatgcttcgctgtttgaattagacaacattaggtggtttcacaactttagacttgggaaattctcatatcatttggacactatggaatggttggcttatgttggaattggacacacacctctcttcctctttcaaaacccctaaaacctgttttcggtggggtttgggtgcatgccagttgtgggaagtagcaccccggccactataaggattaagctcgggcctctgttgcaaagcactaccgtacttccacatgtctaatgggtaaggcttagtttgtggctcagtctagtcataaacaaaagtacacggattggagatggatgaagtcgggtgtcgatggacattctccagggcaaatgaaggctacacgagctgcggcccggtagtcgagatgtcatatggcagagggttggtgccctgctgctaggggctcagttctgcctgcctgtcccgggtatcccggccgtaggtgggattgggtcggtactcttgtctaaggctaggatgggttggaaactatgtcacgtcttccgtccgtataccgtggtggtatgtggcgcgtggttacacgtgaggaagatgtgtcttgtgggtaaagatgtacacctctgatcagagtaaatctattcgaatagccgagccctcggttatgggcaagccgagcaatgtacccaagtcagtgttttaattcttaaaatttgctcagcaactaaaatgtggaatggttggcctgggttggcttgggacgagctgggacccagggtcgggttgccagttcggtctgaatcatcgtaggccttgggttaaggcaggttcgtgagggttcacggccttgtttaataatactgtgtagcgctaggatcgtctttataaaatggctttgggcaactaagtgacttttaaatgctgtttactgcaaaacttaaaccctatattattacccccttgtactcctttgcattaattgtgcatctccggtgtggcttgctgagtactgtggttgtactcattcttgctcaatcttttcccccttcagtaagagaagctttggagaagaagtcttaggtggagtcctggcttataccccagttgagcgcctgtgaagatggagccgtaggcccgctagtccgctgctgtttatttttgattgtcaggcctgatgcgcctttgtaataatgtaaatattatcgatataataaagatgtgtcttttatatcatgtttgtgtggtgtaccccggcttttcctgggacggggattaatacactagcgttcgggaaaaggcaattttcccggtcgcgacaggcactagccccgacccgcgccttttgaggaccagaacctgggcacgagcccttattcaagctaagacacaaaagggccacggcacagatcatcctcatctcatacacatagcaagataaaattaacacaaaaatttcttcatttttgattacagattaagttgatctatacaaaaaagaggcccgaaggccttagaagaaagaaaagaagaaaagactgaagaatggcgggggtctgggggctcattccgatgcgcccggatcgccggcctcgacgtcactgtcgtctgcaccaccggcattgccctcctcgtcggagttgggggcaaacgcaagccgaggggccgagccctcgaagctgtcgacgatatagtcggcggcatcccggacttgcgcgcgcgcgcggtcctcggtcccaggagggaactcatccagcgccatccatggagagaagttggggtccctggcctggtaactcgccaggacgagctccaccgctccttgggcgaggtccctcgaggatgacttaattgtcttctcgagctcctcgggaagccgttggagagccccggccatcttcgagaggtgctgggcgaggcctccctggttgtcggcgtactttgcggtctgccctctccagaggcccacctgccgaccggcgcgatctaggcgggagacggcgtcccaaagcatgccgggcccgacctcgcctgccaaacggagggcttcgacctccccggcggatgagtccagcgcgctctgcagaccggcgatggtgtgttcagcatctgcgaggcgggcggctaagtcgctttcgcccgcggccgccccgccgctgcgcgccctcgcgtccagctccttcgcccgcgcctcgagctcagcggcccgctggttcagtgcggccctctcggcgcgggcaccttccagattgcggcgcgcctgctcctcctgcgctgcctcgcggagggacaggctgtccgccagctgttgcgccgcggcctcggccccctcgagagctcgctcccgctcggtgagcgcgtcctcgcggaggcggagcgcgagctcttcttcggcgcaggcagcctcgtgcgccgccagtgtcgcttcccggatggtgacagcggcctcgcggtccgccagatccctctccacgacgcaggcgcgctcttccagcgccatggcgcgcgcctcgagggtctcttgacgccgccgggacaccgcttcggtctccgccgcccgctgttctcgggcagcggcagcgtcaagcaccccctgggcggcgtcgagcttcttccctagctccgcctcccagctcccgtattgaaggcggagggtgtcctgcgcctcgttcattacggtggtggcaatgagggcagccccccgctcctcctccacttccttggcgatctccgccaacaccttcttacgggtttcaagctccgagacatgccggcggtgagccttacggcccacctccaccatggcctccaccgagcgtcgcccctcttcgacgcgcgcccacgcggtgtcgagctccgcccgctctgcctgcagggcctccacctgggcacttaacccgtccaacaccgtggtgtttgcggcggccaaggcttgcagaaggggctctgcgctcagtagggcagcagaaggcgtggggaaaagtcgcctcggagaagatgccgcgcggctcggcccgccgatggacgtgccagacgcagggatgtcctccggacctggttgagcctgagcgtcgcccgagggagtgggcccaagcgacgtgcccgctgccacgtcgccagctgccccggaagttgtcgcctgagcgtcgcccgagggagtgggcccaagcgacgcacccgcggcctcgtcgcgagctgcctcggaagtcgccatcgcctcgtcctggcgaaatccagcctcctcccgagcggcttcctcggcatggtgggctcgggcggcctcctcccgagcagcttcctcggcctggcaggctcgggcagcctcctcccgagcagtttcctcggcctggcgagcccgggcggcctcctgggcggcctcctcggcttcccgtaggcgatccgcggcctctcgccggtcagcttcccgcctgcgggcctctgcggccgccggatcctcggcctcaggctggccggacttggaatgatgggagggacgcgacgggatctcgctgaaacaaaagaaaagaccagaagacgaacaagatgggcgagtgaaaactcatgttgagagaatgaatacagccacgatgggtgagagacgaacctgcgagggggtcggttaaacgaccactttggaggggaaatgaggtttccccgagatggttctgtctcctccatcttgcggggccgcttcttcttgcgctccccctcgagctgcgatgctggcgcggccccctccgggcgcttgctgctggcacgcgccgccccgccccctcggggaggagatgggggaggtgttcctccctgcttcctcttcccccgggcgtcggcagggcggctgctccccgggcccctgacacgggacccagaagcacgaccccctctcggggtagattgctccccccggcggctccctcctgcgccgtcatggccctttggagctcgctcctcagaggccccgacccccatcataatggtcaggatcgaggcgcggtctggatcgctgcagagggggaggattccttggggaatgagggccgcctccacggagttgagattcagcacccgttggaccaatatcttgaagtcctcaggagcccagtcccatctcactccctggtgggtcctcatgtagtcttcggacccggtgtactcccaggcgccccgagcgcgccgctggagcggcgcaatccgacgacggaggtagtcaccatacaccatggcccctgtgagcccctgggatcgcaggcccgccaggcggtcgaggacggcgtcatagccatcccccagatctaccggcgcccgccagctggaggcctgcgccgggggctggctcggaagtcggaggcgcgcttcgtcggcgagggcagtgtagaaccaatcgctcttccagtcgtcccacttcttgcggagggcgcaggggatgtagcggttcagcgccggcccccgtggctggaagtagcagccaccgactaccgatggcggcgacaccgactgcacggtgaagaaccaccggaacagccgaagagatgggcgcaccccaatgaacatctcgcacagatgcgcgaagatggccaatgtcatcaccgcgttgggggtgaggtgcgccatctggagatcgtagaactccagaacatccatgaagaaagaagaaaatggcggaaccagccctgccattgcaaaagggagaaagaagacggaccgccccgggtagtctggcgccgggcgtccctcgcccagcgtgactatctcccggccggcggcagattccggcatgaagcggcgcggcagcccagcctgcctctcactcacgatgcgggagggcggcagcacgctaccatcgagcagagcggagccccgtgccatggcgccggaggaagagaagattaagagcgagcgcgtgtggctagggtagggcgcaggaaagaaggagttagggcgcaagcggcaaagacaaggggaataatggcgaaaggaaggaagcaaatcccttcctcagtgcctttatacccttgccaacgctgtgcccggctcctcgtttctcgcgcccactatttcgccccctcgtttctcgcgcccacgcttccactaatcccattcgcccgcttgcggcgcatgaggtggatatgcggttgtggcggtcgaggtagatcatatcatgcgcgcgttaattacgctcgccaaccgaagcgacgttaccatatcttcagatgaaacgaatcgccatgtccagattcgtgtgctactcgagtaatgtggcagtcttgaagagaccgctcattattgacaaccgagttaccattgccgatgtgcgtgatttttgaccgttggttttctgcccaattgtggagaccgatcccacctgtcaccgggccttaggagtggcgtcacgcccgaccatttcccttgaggagggcgatcgccctggcataacgccgggggctactgttggtgacatgggatcgggagtatcatgactagaggtttgaggcagacacaatcgcccacgtggcctggcaccctcgggggacgtcaggcccgaaggtggtgtgttcgccctcctcttagtccccccgagggggtcgggctgcacccccctcggccccgagggccgaggcgccccgacccctcgtgggatttcgctccgcgtgtatggggtaggtgagcacagtggggctcacctaaccacatttattgcggcttggctgagcgtgtcacgacgcatgtaatgtagtgcattgcactcatttatccggtctgtgaccagtcacagaccggtcagatcgcgggattaggtggcgacaggcggtctgacgcacgcctcgccccatcccgtcaggacgagggcttctaggcgctcgtccccagctggagctagcgtgttacctcccagagatggcacgttagtcctgatcagatatatgccaggcttcatcctaaccattacaggcaaaatgtagtgtgaaggagggccaacatgcagattgctaagctgacacgaggtggacaagaatgaccgatttgtgaccattctgacaccggtcatgtcgccagcagacagccatgattctacgtcgcgcctgctcccggcgaaagtggaggtaggtgcaggccgtcccatcagaaggtgactcgaacggcaaccatgcagatctccgtccatttatgaaaaggtagggtaagtccccataaaaaagggggggatggtgcatgtggtatccccttaagatataaaaggaggaccttgcccacggagagagggggatagattttagagagagctttttcttggactggacctttccagattaggggcccagaacaagggagaggcgggctgatactttgtagctctttgatacacagatctcccaaaaacacaggagtagggtattacgcttctcagcggcccgaacctgtatacatcgccggtgtcttctgtgcttccggtctcgcgaaccttccacatacagattgggagtttagagtctcacccagggtccccggccgaaccggcaaaggggggccagcgcggtctcccggtgaggagccccacgctccgtcagcgtgggatgcattacatatgaaacacttagcaagttcgtacgggaatgaaaattggtatgtaggaagacagtaaaattaaactaactctgtgttgtacggtaacagtatgaacgtcttgtaatgctgcgccttcaggagatggacgagattgtcctctgtttcctgcggatattggtcgagcattgcaacgtttactctccgagggtcgatgaatccagtatcgaaaaccctccgccgtcgggccctttgaatctccattctacaacgataaaagggagtattttattttatatagtctacttatatacaaggacctaattaattaaaggagacgtagtaattaagaattataattgaacgatatacttacaaagtccagcaactcataatagagacgtcgagggcgtccagctggtatacttcgtagattcccttgaaattgatccagagaatatcatctccttgcaagaagtccgggtccctgatcctcgctccgatcatctctctaccggtggcgctcatctccacgtacagctgatggaacttgtacatttgtgtgggtagggactgcaccagctcggacttgacaagcggtttaccgagttcgtacatgtatttcaattccgccttttctattggttcaactcctagcaattgatccgtagatagaccggtgtcaataataaattcttctatcgtcatgtctttcccggttaccaacggctcgatctcctggtttggttgctctccaagctgagggactggtttggactttccagaagatgctttcttcagcgttcgctcagagtccgatagcttgatggcctccttgacaggtgcagacatacccctgaagaagttcatgacactggggtctataggaatattcttttctggacttcgaggcttgaattgtctcttgacttctgatgcaacgtaagcgtcaagctcctcttgcgtgcaatcgtaccccgggtccttgttcttggcggcgtcaactttcgccttcttcgttgcccttgtgtgggtaggcggtggagctgggggggcccttgactttgaaggtgccggaagaggagcttgcggaggagtaggtgtaggagcacgaggaggagtcggtgcaggatcctgaggaggagtcgatgctggagcctgaggtggagacggtgctggcggagcatgaggaggagacggtgcaggatcctgaggaggagatggcggagccggaggagatggtgcacgagacgccgtttgtcgcccagggaggatgatgtaccgcctgcgccatagaataatggcatggcttgtgtctcgtaaatgcgtctcaccgtctcctccagggtaatccagctcgaggtcctcgtacgcgccttcgaccaactcaactttgaccttcgagtatcctgctggaatcggcctgcagtggtaagtacctgaagggtccgttgggatggccatgcccgacgccaccttcatgttgtgagagattatttattagtaatcaacatatataagcagcaactagcggaatggctaaatcttacctttattgataagttcttgaaaggaatatgcagctcacatggtgtccgctgagtgatgtcatcaacgggacaggtcgattcgtcctgtgtttgcatggcgtccatactctgtgatcctacctgccccgttgaggcgcagctgctacggtttcctgacgggctcaccattgcaggaggaatggtcggctggggatcatgggaccgatgtgcggccatgcgttcatcaaccttccttgccacctcctcttgcatgttgagttcgtagctcgatacccggaactctaggtctgcaatcttcgcctcggtatctctcttgctcctcatccgactcctgtacgtgtggatgtcctccttgaaaccaatcttccaaggaatcacccctttcccttgtattcgtcctggatgctctggagtctgcagggcgagtgtcagctcgtccctatctctgtctggtcggaacgtgccctgagaggaggcttccactgcatctgttagtcgtcgcgcagcctctcgtatctgatcgccgaagaccagtgagccatcagctgggttgagcgttccaccgtgagcatagtaccagaacttcgatcgttccggccaattggctgttgccggttcgatacccctctcaatcaagctagcctccatctcctcccacttcggcatcgcgacgctatagcctcctgaccccaagtggtgatggtacttcttcttggcggcattttctttgtttctttccatcatcgcctgcccttgttcacctgtcttatatgcaacgaactcgtcccagtgatcccttagctttgagaatgtgtcgaagttcggtgtctgccccttcagtatatacttctggtacagatctcccttgaagctctgaaactgttctgccattttcttcagagtccaccttttcactttgtcctctgtacccgcaggaagggtgaatgtctcgagcattgtggtccacagcatctctttctccgaatctgggacaaagctctcatgatctccgcgtgcccttgttcttcgccagtacaccgtactgacaggcacgttatcccgcacaacccaaccgctgtgacgtacatagttcttggcggcttcggccggggcactaggacgtccatcttcttccacttccgttatgatgtgccgaccctcaagcttcttcgctgcacctcgttgcccgcgtgccctcttctgtccaacggagggttgactaccactagcctcctcctcctggttcccctccacatccctttccacgtgcccctgctggttcccctccgcatccctctccacgttcccttcctccttcaagtactggtttggatcctcgttcccctcttcttcattccagtactggctgcttccctccgcgattgtatcgtacaatatctgttcctcatcgcggtcagccatctgttgatacaagaaacatctgctaagtcacgagacatttatgttttaacaatctaagtcatgtatgctaagtgtaaatgtcgtacattagaaccctacacaaccttacatgctaagtctaattacaaatcgtgatataagctaagtctaggtgacgtatattatacaaccctagctagtaaataattatatactaagtctaattacaaataaaataatcttatattaaaactcaaataatattacatgctaagactaaaatagtcatgtatatgctaagtgtttcgtgcgtatatgctaagtctaattaagactacaatagtcaattgctacttgtcgcaccaattccgtagtcaataattacatactaagtctaattacaaataaagtaatcttatattaaaactcaaataatattacatgctaagactaaaatagtcatgtatgctaagtgtttcgtgcgtatatgctaagtctaattaagactacaatagtcaattgctacttgtcgcaccacttccgtagtcaataattacatactaagtctaattacaaataaagtaatcttatattaaaactcaaataatattacatgctaagactaaaatagtcatgtatgctaagtgtttcgtgcgtatatgctaagtctaattaagactaaatagtcaattgctaggagtcgcaccaattccgtagtcaataatgtcatactaagtctaatttgcaataaaataatcttatattaaaactcaaataatattagaacactacacaatcttatatgataagtctaattacaggtctaataatcttaattaattgcattacaaatataacaatcatttatattattacgtcacttgcctgctccaattccttctagggctagctcttccactcaggcttgacggacgactccgacaacacgtcttttctgcaagatacaaaaagatgtattaggataaatgcgaagtaacatatatatatatacatatatatatatatatatatatattgcatttcacgttaacgttcgtcctcgttcgttcgctcgttctcgttcacgttcgttcgcttgttctcattcacgttcgttccctcgttctcgcttgtcttcgttcgatcgttctcgttctcgctctcgttcgttcgatcgttctcgttctcgttcacgttctcgcggcaacgtacgttgacgtgttcgttctcgctctcgttcgttcgatcgttctcgttctcgttcacgttctcgtggcaatgtacgttgacgtgttcgttctcgttcggcgaaggcggcgacggcgtggcgacggcggcggcggcgtggcgttggcatgcggcggcggcgttgcgcggcggcgaaggcggcggcgtggcgtgccggcggcggcattgcgcgcgcgccggcgaaggcggcggcgtggcgtgccggcggcggcattgcgcgcgcagcggcgaagacggcggcgtggcgtgccggcggcggcttggcgcggcgtcggcgtggcgcgtcgtcgtcgtggcgcggcgtctcgtggcgggcggcgcgacggagagagatcgagatcggagagatcgagatgaagggagatctggcggcggcggctctcaccccagagatgcggcggcatcggaggaggcggaggcggcggcgaggacgacgagctcgagacgacggcgagatacggcggcgtcggcgcggggatttgccctaggcagtggcggcgaaggagagaggccgagagagatcgatcggccgaaaacgtctaagtgttggtgaagaagacgagggcgcaccggaaatatatatacccccggatctttactcccggttgttctcaacaaccgggagtaaatatcttttcccgctatttcgaaattctttttaaacccggttagggttaagaaccgggactaaagattatagcactgcatatgattttcgcttacatatgtgtttataaaatagaagttaatgcattaacattatttaaagtacaaagattaatgataattacttcgaaaaattatttttgtctgtaataaattaagtggataaatcgtaataagcaaatatatgacttataattaataaaaattccaatatatatatatacttagcatatatatgaatgatattattatattggtaaaaactctaattaagatatgtatgtacatactgcatgatttaaaattaataaaaattgtaatcatcatatatacttagcgtaggaattatattaaattaaatgctaaaaactctaattaacatatgtaaatgccacatgcatgatttaaaccttttaaaaattcgaatagtcatatataagtagcatatgaaagatagtaaattaaattgtgaaaaactctaatatatgaatgatagttttaaaaatatattaaatttaatacttttaaaaattctccagtcaattataatttgcatatgaatgatagtaaattaaatgttaaaaactctaattaacatatgaaattgccacttgcgtgatttaaaacttttaaaaatcctctagtcaattataattagcatatgaatgctagtaaattaaatgtttaaaactctaattaacatacatatgaaattgacacctgtgtgatttaaaacttttaaaaattgtaagtatcacatataactagcatatacatgatttaaacttgttgaaacctctaataatcgtgcgtaattaacatatgccatacatcaattgatttatatggataatcaatacatccaaaatagtttacatcgtgtacacaataattacggcattacatcggcggtgacggttgaccgcacgtactttctcctcactattgttccctccttgtgatcgctgcgtgagtaaggggtgtcttcatttgataggaggatgctagggtcaatcgtcaccgtgaaagggggttgcccatccaactgatcgtaatcctcgtcagtcttgtcctcaactctgacgatttttcttttgcctgggagaaccacttgacgcttaggctcatcaggccctctgcccttctttcctttgctagacatgtccttcacgaaaaagacttgcgttacatcattggcaaggacaaaaggttcgtccgagtatccaaccttgttaaggtcaacagttgtcatcccactgtcatcaatcattacgcctccaccagtcaacctaacccattggcaccggaacagaggaaccttgaaaggaccatagtcaagttcccatatgtcctcgatggcaccgtaatacgtggcagttgttccatcgtgtcccatggcatcgacacgaacagcgctgttttggttcgtgctcttcatgtcttgggctcttgtgtagaatgtgtacccattgatctcatatcccaggaatgtcgcgatcgacccagacggtcccctcgccaggaaggcaagttgttggttgattgactcgttacccatgagatattgtcgtagccacgcggggaaagtatcaatgtgatgccgtgtaatccatgcatcggacataccgatgttcctagcgcgaactagagccaagtgctcctcgatgtaaggagctaccaatgaagagtgttgcagaacagtgaaatgggctttacggaataaattgttgtctaccgtcattattgctttccttccgagagttccctttccccgtagtctcccttcatggcgtgattcaggtaccccgattgggcgaaggtcttcgataaattctacgcaaaattcgatgacctcctctgttccataacccttggcgatgcttgcctctggacgagcacggttacgaacatacttcttcagaacgcccatgtacctctcgaaaggaaacatgttgtgtaggtacataggcccgagaatacagatctctttcacaaggtgacaaagcagatgcgtcattatattgaaaaatgaaggtggaaatatcaactcaaaactgacgagacattgcaccacttcattctgaagggcttctaatctatccggatcgatgaccttctgcgaaattgcgttcatgaatgcacatagctttgttattgttgcccggacattgtctggaaggataccccttattacaactggtagcagttgtgtcatcaacacgtgacagtcatgagactttaggtttgtgaacttcttctccttcgtgcttattattcgcttgatattcgtggagtatccagacggtacctttatgctctccaagcattcaaacatactttccttctctgccttgctaagagtgtagctggctggactcaagtaatggcttcctttctcctttggttccgggtgaaggtcgccgcgttgttccatatgcttcagatcattacgtgcttccagtgtatctttcgactttccgtatacacctaggaagccaagaaggtttacgcaaaggttcttagtgaggtgcatcacgtcgattgcgtggcgtacgtccaagaattcccaatatggtaactcccaaaatatagagttctttttccacatcgccgcgtgaccatcttcgctctctatatgctggcttccaggcccctttccgaacactactttaagatctttaaccatagcaaacactgttttcccgctgcgatgtttaggcttagtacggtggtcggccttatgttcgaagtgcttgcctttcttccgtaccgggtggtttgctgcaaggaatcgacgatgacccatgtatacaaccttcctacagtgcttaagatatgtactttctgtttcatccatacagtgagggcaagccttgtaccccttgttgaactgtccggataggttgctaagtgcaggccaatcgttgatggttacgaacagcagcgctcgtaggttaaactcctcctgtttgtcctcgtcccacacggggacaccttccttcttccacaactgtttaagatcttcgaccagtggtcttaggtacacgtcgatgtcgttaccaggttgcttggggccttgaataataatcggcatcattatgtacttcctcttcatgcatagccagggggggaggttgtagatacacatcgtaacgggccaagtgctatggccgctgctcatctctccaaaaggattcatgccatccgtactgtcacgtcctgataaattcatcccgaaataaaaatcattttctaaaaggaataatagaattaattaaaattcggaaagaaattggcaaacactaaaatacgtacaagaaaaattcgaatgtggcccggagaatttttgttaaattctccttggtctaaaaagagccctcaaattttacttgaattttcagagcaccggaaataattattaagcaacaaaaacaattatcaaagtttattaaaaagaaaaacctaaaaaataatcctcttcctcctttgggccaagcccagcccaaagtctccctctcctccctctctttctctccctgtccttctctccctcctcctcttgggcctcctcccctcccggcccactccctcctccctctctctcccgggctgcctctccctcctctcctcctgggccggccgctcggcccaagccgcgccccctgcccgagccgcccctccctcccgcgcacgtgcgttgcacgcgcgctgagcgcgcgccccgcgtgggacccgcctgccaggcgtttcttcctcctcccgcacagcttctctctccccgtgcgaaccctagctcgctccctcctccaaatccgcttgattcacttggttaattccaaaattgattagggggttttaatccccattgattcctcttcaatttcccccaatttcccccttgaatggcgcccccaatcgtcgggaacgcccgcgttttctccggccaccaaccatggccgccggccgcctttaccgccgccgttccgacctcccccgtggccggctccctcttctctcctataaaatgcaaccccctcgctccgttctatcgctttagccccctcccgcggtctcccatggtccctagccacctccccaccgtcgccctctctctcccgtgccgctggacacctccagccgcccctaccgccttgcccgtgcgccggccggccgcgccgtcgcctcctccagcgtcgccgccacctcctccaccccggcctgccctccgtttcccgcggagacccccggagctgccttcccgccgtcgccctactctttcctccgtgccggccacctccagccgcacctcccgcctcgcccgtgcaccctccggctgcgccgccacctctcccggcgtcgcagctgcctcctctttcccggcttcgcctccgtttcgcggggaaatcaccggagacgcgtcctcgccgacgactagtggtgtcgccaccactccaccatctccagccatccctaccgcctcgcctgagcgtcggccgacgtcgccgtctcctccctcggcgtcgccgcatcgccctccaccccggctgctcctcggtttcgccggaacgccgtcgccgcgccggcctctccatcctcttcgtcgccggcgtcctttcggccgccccttcctcctccccggctcgtcggcttgctgcaccactaccacctccggcatcgcagccgcaaggtcgtcctcggcatcgtttcccctccatccaaacccctccgcggtccatcatcgtcgtctccgatcgttctcgtcgtcgacgtcccgtcggtcgcccggctcgtcgtctcgcggcgccgcctccgtcatcgtcatcgcagcggcgtgttccacgtcgtcctcgtccccgtgcagccgctgccggctgtcctcgtcgcctcctcgccggtcccggtcgtcgtcgtcgtcgtcgtcctctcgtcgttcccggtcgtcgtggcgttcgtccctccgtcgagccgttctcgtccgtcgtccgcgttcgtcaagtgagccgccgcagccccgtcatcgtcttcgtcctcggctccgcatcgtcaagcctcgtgccggccgcgtctcgccttcgtccaaggatcgccgccgaagtcgttccctcgcctcgccgcgtagtggtaaggacctctccctcgctgccccgtcctcgtcctttcggtgtcgccccgtacccgttgtgcggtcgtcgaccccggtacccgtgtaccggtgtcggtagtcgttcacgtgtgcgggtggtgaccgtgtagtgtccgtgttagtgtgttcgctcggtagccgcgtggtttccacgtgtgcagcccgcgtggtgtctagtggagtccgtttgtcggctactcgcctcggttgacacacggggtccgcttccgttgacccgtggaccgtctctgtgtacccggtctaccgcggtcctttaggttgacatgtggggtccgcatgtcaacagcgcagccttcctgtctcttccaggctagcgcttacacctgttttataattgcaaagcttaattataataatccgcaaatctccatataacagcattaaacctcggatgatcatatcttggtcatacgaactctgaatcgacccgttcaagtctcctaatgtttgttataacctaaagaaccctgtgctttctttttatgtattgttattgcttctttataggcttgtagctttgcttgtgtgcttcgcgtagctttcgtcgttccggaggttcccgaagcgtggttcgtggtcgtcgccgaaggttcggaaggccgttctctctgagtaaggcaagtcacgtcatccttgaacatattgaatcccagtttataaaattatgttgctttaaattattgcattatcgctttatttaaattcccgcgttatcactgttttatctagccatgcctatttacctttgttatgaccttattgttgttgttgttattatttccttgttcaccctagaataaacaaaaccccaactagtgggtactctatttatggttccactagtatgaacttaggtagatgcttcgctggttaattaggcaacattaggtggttttataactttagactttgggaagtctcatatcattcggacactatggaattgttggtttatggtggaattggacatacacctctcttcctctttcaaaacccctaaaacctgttttcggtggggtttgggtgcatgccagttgtgggaagtagcaccccggccactataaggattaagctcgggcctctgttgcaaagcactaccgtacttccacatgtctagtgggtaaggcttagtttgtggctcagtctggttataaacaaaagtacacggatggaggtggatgaagtcgggggtcgatggacattctccagggcaaatgaaggctacacgagctgcggcccggtagtcgagatgtcatggcacagggttggtgccctgctgctaggggctcagtcctgcctgcctgtcccggaggttccggccgtaggtgggattgggtcggtactcttgtctatggctaggatgggttggaaactatgtcacgtcttccgtccgtataccgtggtggtatgtggcacgtggttacacgtgaggaagatgtgtcttgtgggtaaagatgtacacctctgatcagagtataatctattcgaatagccgcgccctcggttatgggcaagccgagcaatgtacccaagtcagtgttctaattcttaaaatttgcttaacaactaaaatgtggaatggttggcctgggttggcttgggacgagctgggacccagggtcgggttgccagttcggtctgaatcatcgtaggccttgggttaaggcaggttcgtgtgggttcacggccttgattaataatactgtgtagctctaggattgtctttataaaatggctttgggcaactaagtgacttttaaatgctgtttactgcaaaacttaacccctatattattatccccttgtactcccttgcattaattatgcatctgccggtgtggcttgctgagtactgtggttgtactcattcttgctcaatctttcccctcttcagtaagagaagcgttggagaagatgtcttaggtggagtcctggcttataccccagttgagcgcctgtgaagatggagccgtaggcccgctagtccgctgctgtttatttttgattgccaggcctgaagcgcctttgtaataatgtaaatattatcgatataataaaaatatgtcttttatatcatgtttgtgtggtgtaccccggcttttcctgggacggggattaatacactagcgttcgggaaaaggcaattttcccggtcgcgacaagctggtatcagagccatctcgactgtaggataagccaagtggataaaacctaaggacatattttataaatgaaactatttgcgaaagttccttttcctcctttcccgtgtgctatttgcaaaatgtttactctttcttccgtcttcaaatttcaactagtactagatggttagttttgcgagagaagaagatgtcgccaattgtctgccgaagctccggaaggctgcaggattcgctagcgaagtggaggaagcagtgaagccagctgtgaagccgaagctaagatcttggagaacctgtcgctgaacctaagccaccctctagggtagagtcgttagtcgtgtgttccttgcttgtgtgtgtagtgcgtggtttgcatcggtgggttgtgatgtgaccatgctaggttgtttgtttaatcaacttgcagaataagcaaaacaaacaacacatcaacaaaaagagttagttcctttaaggtcttgtccctagctctggtctattctttccttgtatgcttcctctctcaacccctaccttgtgacagatggataacactggtaacaaaggctatgggaatgatggatccgatgactcaagaacccaagccaatgggaatgagaaaagcatcaacgaaacctcaccagagctaatccaaattgtggttaaccaaaccaacatgttggcaacagcctttcaactattacagaattggaacaacccagcaggggcaaccaacgttcaagtacctacagtccagcaacagtgcaagttatcagaatttctcaaaactgagcctccaacctttgccattgccgtcgatcctatggaagccagtgattggttgcgcacaatcgagaagaagctagggttgattcagtgcaccgaccaggagcgggttggcttcgcaactcatcagctggttggaccggcttcagaatagtgggaagtgaaccaaatgtaaagaaagtgaatccgagttgcttgttcatgagagctattcccagttatgaaccaagtgatatgttcgaagatagtctatggaggtcagattaaaatcgcatctaacaacgaagcttcagatttggcaggataacgatcagaccataacaagtccagcagcaaagtcatttggggagacgtcaaagcatgtcaagtgggataagttggttctttttagaaacataattcaaaggcaaagttaccgacccttgcatcgaatagcagaagtagctagcacctggagagcaggaaagctaatatgaggcagttggtggcaagttagaagtaaatgacaagcatggtatcctagtaatgacgagctgatctcgacgcatgacatgaagtgggtaacttgtatgaggttgactccaaagatatgaactatgcgaagttctggaactgaagccccatcttcaagcgccgcaacccagtcgaagtcagctaaaggttcaaccagggacaagtcaggcgaagagaagattccatctgcaacaagggatcgagccaagcagcctagagtggcgaagttttgctaggcaagtttgttataaaagacgcgacggaagaagtcagacaagaagagaagaccgcccaacctatcttcttgctagcctcctcgaatctcggggacgagattcttgtaaggggggtggatttgtcacgtcctcataaattcatcccgaaataaaaatcattttctaaaaggaataatagaattaattaaaattcggaaagaaattggcaaacactaaaatacgtacaagaaaaattcgaatgtggcccggagaatttttgttaaattctccttggtctaaaaagagcccttaaattttacttgaattttcagagcaccggaaataattattaagcaacaaaaacaattatcaaagtttattaaaaagaaaaacctaaaaaataatcctcttcctcctttgggccaagcccagcccaaagtctccctctcctccctctctttctctccctctccttctctccctcctcctcttgggcctcctcccctcccggcccactccctcctccctctctctcccgggctgcctctccctcctctcctcctgggccggccgctcggcccaagccgcgccccctgcccgagccgcccctccctcccgcgcacgtgcgttgcacgcgcgctgagcgcgcgccccgcgtgggacccgcctgccaggcgtttcttcctcctcccgcacagcttctctctcccccgtgcgaaccctagctcgctccctcctccaaatccgcttgattcacttggttaattccaaaattgattagggggttttaatccccattgattcctcttcaatttcccccaatttcccccttgaatggcgcccccaatcgtcgggaacgcccgcgttttctccggccaccaaccatggccgccggccgcctttaccgccgccgttccgacctcccccgtggccgtctccctcttctctcctataaaatgcaaccccctcgctccgttctatcgctttagccccctcccgcggtctcccatggtccctagccacctccccaccgtcgccctctctctcccgtgccgctggacgcctccagccgcccctaccgccttgcccgtgcgccggccggccgcgccgtcgcctcctccagcgtcgccgccacctcctccaccccggcctgccctccgtttcccgcggagacccccggagctgccttcccgccgtcgcccttctctttcctccgtgctggccacctccagccgcacctcccgcctcgcccgtgcaccctccggctgcgccgccacctctcccggcgtcgcagctgcctcctctttcccggcttcgcctccgtttcgcggggaaatcaccggagacgcgtcctcaccgacgactagtggtgtcgccaccactccaccatctccagccatccctgccgcctcgcctgagcgtcggccgacgtcgccgtctcctccctcggcgtcgccgcatcgccctccaccccggctgctcctcggtttcgccggaacgccgtcgccgcgccggcctctccatcctcttcgtcgccggcgtcctttcggccgccccttcctcctccccggctcgtcggcttgctgcaccactaccacctccggcatcgcagccgcaaggtcgtcctcggcatcgtttcccctccatccaaacccctccgcggtccatcatcgtcgtctccgatcgttctcgtcgtcgacgtcccgtcggtcgcccggctcgtcgtctcgcggcgccgcctccgtcatcgtcatcgcagcggcgtgttccacgtcgtcctcgtccccgtgcagccgctgccggctgtcctcgtcgcctcctcgccggtcccggtcgtcgtcgtcgtcgtcgtcctctcgtcgttcccggtcgtcgtggcgttcgtccctccgtcgagccgttctcgtccgtcgtccgcgttcgtcaagtgagccgccgcagccccgtcatcgtcttcgtcctcggctccgcatcgtcaagcctcgtgccggccgcgtctcgccttcgtccaaggatcgccgccgaagtcgttccctcgcctcgccgcgtagtggtaaggacctctccctcgctgccccgtcctcgtcctttcggtgtcgccccgtacccgttgtgcggtcgtcgaccccggtacccgtgtaccggtgtcggtagtcgttcacgtgtgcgggtggtgaccgtgtagtgtccgtgttagtgtgttcgctcggtagccgcgtggtttccacgtgtgcagcccgcgtggtgtctagtggagtccgtttgtcggctactcgcctcggttgacacacggggtccgcttccgttgacccgtggaccgtctctgtgtacccggtctaccgcggtcctttaggttgacatgtggggtccgcatgtcaacagcgcagccttcctgtctcttccaggctagcgcttacacctgttttataattgcaaagcttaattataataatccgcaaatctccatataacagcattaaacctcggatgatcatatcttggtcatacgaactctgaatcgacccgttcaagtctcctaatgtttgttataacctaaagaaccctgtgctttctttttatgtattgttattgcttctttataggcttgtagctttgcttgtgtgcttcgcgtagctttcgtcgttccggaggttcccgaagcgtggttcgtggtcgtcgccgaaggttcggaaggccgttctctctgagtaaggcaagtcacgtcatccttgaacatattgaatcccagtttataaaattatgttgctttaaattattgcattatcgctttatttaaattcccgcgttatcactgttttatctagccatgcctatttacctttgttatgaccttattattgttgttgttattatttccttgttcaccctagaataaacaaaaccccaactagtgggtactctatttatggttccactagtatgaacttaggtagatgcttcgctggttaattaggcaacattaggtggttttataactttagactttgggaagtctcatatcattcggacactatggaattgttggtttatggtggaattggacatacacctctcttcctctttcaaaacccctaaaacctgttttcggtggggtttgggtgcatgccagttgtgggaagtagcaccccggccactataaggattaagctcgggcctctgttgcaaagcactaccgtacttccacatgtcttgtgggtaaggcttagtttgtggctcagtctggttataaacaaaagtacacggatggaggtggatgaagtcgggggtcgatggacattctccagggcaaatgaaggctacacgagctgcggcccggtagtcgagatgtcatggcacagggttggtgccctgctgctaggggctcagtcctgcctgcctgtcccggaggttccggccgtaggtgggattgggtcggtactcttgtctatggctaggatgggttggaaactatgtcacgtcttccgtccgtataccgtggtggtatgtggcacgtggttacacgtgaggaagatgtgtcttgtgggtaaagatgtacacctctgattagagtataatctattcgaatagccgcgccctcggttatgggcaagccgagcaatgtacccaagtcagtgttctaattcttaaaatttgcttaacaactaaaatgtggaatggttggcctgggttggcttgggacgagctgggacccagggtcgggttgccagttcggtctgaatcatcgtaggccttgggttaaggcaggttcgtgtgggttcacggccttgattaataatactgtgtagctctaggattgtctttataaaatggctttgggcaactaagtgacttttaaatgctgtttactgcaaaacttaacccctatattattatccccttgtactcccttgcattaattatgcatctgccggtgtggcttgctgagtactgtggttgtactcattcttgctcaatctttcccctcttcagtaagagaagcgttggagaagatgtcttaggtggagtcctggcttataccccagttgagcgcctgtgaagatggagccgtaggcccgctagtccgctgctgtttatttttgattgccaggcctgaagcgcctttgtaataatgtaaatattatcgatataataaaaatgtgtcttttatatcatgtttgtgtggtgtaccccggcttttcctgggacggggattaatacactagcgttcgggaaaaggcaattttcccggtcgcgacacgtactcaaaccaaaccgtatgtttcgtgcgtcctttccaaattctttaaattttctgtcgaaacatcgacaaaccaaaccgtaggcccgctagtccgctgctgtttatttttgattgccaggcctgaagcgcctttgtaataatgtaaatattatcgatataataaaaatgtgtcttttatatcatgtttgtgtggtgtaccccggcttttcctgggacggggattaatacactagcgttcgggaaaaggcaattttcccggtcgcgacacgtactcaaaccaaaccgtatgtttcatgcgtcctttccaaattctttaaattttctgtcgatgtttcgccactgcgaaccatcggcggggtgtctcagcatcccgtcctgttgacgctcttcagcgtgccatcgcaacattctagcattccccttgttcctgaacaaacgccttagccgtggtattatagggaaataccacatcaccttagcaggaattctcttctttgttagctgcccgtcaacttctcctggatcgtcccgtctaatcttgtatcgtagtgctttgcaaacagggcatgcttctaggttctcatactcctcaccgcgatataggatacaatcgttcggacatgcgtgaatcttatgaacttcctgtcctaacgggcagactatcttcttagcctcgtacgttgtctcgggcaatttgtttccccccggaagaatgttcttgacgagtttcaataaatcgccaaatgccttgtcactaaccccattttttgccttccattgcaacaactccagagtggtatccaactttttgtgcccctgctcgcaacctgggtacaacgaagttctgtggtcctccaacatcttgtccaatttatgggcctccttttcactttcgcagtcctccctggcgtcctgcaacatctgaccaagatcatccgcaacatcgttaccatcagcagctatttcctccttgcccgtttgatttgcttcaaatccaacatactgagcaaagtccggaatattgtcgtcttccacttcatcttcttccatttcaacaccttgctctccgtgggatgtccaacaattatagcttggcatgaaccccgactcaaacaagtggaaatgaatagtcctggatgcagaatactccttctgattcttacacttattgcatggacaacaaataaaacccctttgcctgttagcttcggccactctcaaaaaataatgcacgccgtcaataaactctttggaccgccggtcagcgtacatccattgccgatccatctacatgagtcaaaaaaaccgtacacaaataattattcttataataatgacagtcatacaataattataagatatctttattcatacaaaaatcataaaatattacaccaaataattcttaaaaactatttgtaaagttttaaactaattttaatgtgttttacttcttttaattttcattttagtttgttttctattatttaagattaactttcactagagttttccttctcaactattttataaaaccttgtttagcaaatgaagtaaatttctatatattctttcttccccacacacattttctctctcatcaacttacaactaaattttggagacaaaaaaagtgtgcaaaacataggtgcaaatgtagtatgacaaaaaaaaatattggaggatgaagttgcaaaccttttaggcacctccgatttgtatgtaatccccaaaataaattcaatagaaattttggcatgacctcccctcttttttgaagaaattttgaagcttgctcgggcagctggaggaggaagaagacatatatataggggtgggactttagtcccggttggtagcaccaaccggggctaaagatcaccgggatctttagccccggttggtataccaaccgggactaaagttacggttggtataccaaccgggactaaagatcccggtggggcctgacatgacctgacagcattcgaaccgggactaaagatgatctttagtcccggttggtaacacaaaccgggactaaagatcaaatatgcccgttacccttttgaaccgggactaaagatcatctttagccccagtttttattgcatccgggattattgtggaaatcggccgaccgacgaaagatggtttctccaccagtgttgcctacttcaatccctacgagcagaacaccatctccgattatatcgacgacaacgagacgaagttgggtcggaacgagctgtacctgggcagcaaatgcatggaaggggcccacaagctcaatgccaagctcggcgacaacggcgacacccagttcagtttggacgagaagcaggaggtcgtcgacagcttccgcggcacccgcatgtggtggaaactgtccaaggcttccgatgactattccttgtatggacgtaagatccaacggcgcaactacatgctggtatttcacaagcgccaccgtcagctcgtgcaagactcatatctccctgaaatcctccagcaagggcgcgcgctcaccgccaagaacaggcagaggcgactgtacacccaccacgagaaccatatgagcacgtggacccacgtcccgtggaagcacccggcgacgttcgacacgctcgccatggaccccggcaagaaggatgagctcatagaagatctcaagatgttccagaagggaaaggagtaccactccaaggtcggcaaggcgtggaagcgaggatacctgctatacggtccgtccggaacaggcaagtccagcacgatctcagcaatggccaactttctcaaatatgacgtctatgacctcgacctaacgaccgtcacgaacaacaccgacctgcggaacctcttcctccagacaacagagcaatccatcatcgtcattgaggacattcatgcgatggaattggaggataaacgcatgagcacagacttccagtggtactatgaaagaaagaaaataacgctgtcggggctgctcaactttattgatgggctgtggtcagcatgtggcggtgagcggatcatcgtgctcacaaccaaccacgttgataagctcgatccgggactgatccgccgggggaggatggacaagcacatcgagatgtcctactgccggtttgaggccttcaaggtgctcgccaacaactacctagacatcaccgagcacccattgttcaccaaaatccaacgactgctcgacgagactgatatgacgccggcggatgttgcccataacctcatgcctcagggcaagaggaagaggaacacgaacaaatgcttgacaggattaatacaaaagctgaagaaggccaaactggaatctggaacgcgcctctcccgaggccgagtcctaccgacaggccatcaaggtataatctaaggcagaagagagctacaccggggaatatatgttgagtgggatcgatgctggctcttgtgtggtggggaattgcctagcaagctagctagctgcatctttctgtgtttttctgttacaatgcattttcgtgtttgtttagtcggttaaactctgcagagtcatagcctaaataaacccactttaattaccacttaccagtaatatgtactgcaggtctccatcctttttaatttgcgtgtgttaggagacgcacaagtgtggtgtgtgataaataaactggcgagtcatacataactactcagtgtaaaactacttatgtaccttatacttcacgttctagaatttgtgttctcaaccttattttgtaaaaaaactgcattgacggacgcttttgtaatattgttattttattgtaacacctaattaacaaaatgtagttggagtttaatcttacttaattacttaagatcttagcctaaacatgatcacctttgtttaatgcgaaaattgatctaactgaccttatttgtgaagccattgaagccggtatttggtttgttgttcgtccttttgctttttctccttcttcttcttcttcttctctgtactgattttctattgatgaaaaggaaacaaagagaaacctcatgaacccctttcagtgtcaaatcgatccggcgattgatttagggcttagggttagagagagagttcaaactcgatcagttgcctcttctcatctttcttatacaacgacactggtggggcttgattagttttgaattatgttttgcaccgatcacacaaaaacaagatcttatctctttttttttctttcttgattgggaaggaaactggtggttgttgattgataaatttaacaaccctttatccatgatcttatttaatactttaattacacatgtattgtccagaacattatcttaattaaactcaatttatgagcctttcgagtatggatccatgagtagatgctcagcttaataattcgattatgggacatatcttttacaaccatatcaatgagttaggtagaagacacacaacatgttgttaccataattgaaaattgtgttttattggtgcacatctgtagacccccgtttttataacaggaatcaatcgtgtaaacagtaccatttccctggatcaagtagtctggtacacacgagttcatagccggaataccaaatgctcatacacgagagtctaataccaaatgctcatacacgagagtctagtacgaattattacaacatgagcccgcaggcattgtcttaaatcatcggaccgagcggtccggaatacaaccaaaagcagagtttagataaggcagcggaatttaggcagcggcatgccattgccacaggcaacgaccgtactaagacctattgggcaccgtcgtcttcatctctctcctggtagtaggcatagggatcctccatagcttcatctcccgtttctgattaattttatatttgcaagggtgagtaccaaccgtactccgcaagccaccacagcaacaatacatatgaaaggggtatttcaaaggatggctatggttcttttgcgcaaagccaattttgtaattcttttcacaagcctaagacctagcatcaactgatcaaattttagtaccagtgtttgtatttaaacaatgacggttatgtccaccatccattgtgatcccaaggatagcttcccgccattgagtcgttatggttttctgaggacgtccactttcccccatctcaggaagtgactccaacagcataaaaattcatcatgcgataacccatcccacacaagttaagaattcagagtctagccaagtgtaatacatgtcccggtgctcaataaccgcgagcacggctattcgaatagatttggtttactcactgtcacgaccggaaataacccaacgggcattccttacgtgcgtgcattaatccttgtcccaggaggcaaggtacaccaaaagttgatacaattcagagtttaacaagcggaagcgtatataaaattattacacgggcagcgaaggcccaacacacgaagacaaacgaggaacagcggaagactagggcgacgaccacaggcgcttgacggcaggcacgagctagacaccgaagccttcatcttccaggaactcctcatctgggcttgggaaaaattgagcaagactgagtacaaccaccgtactcaacaagacacacccacaaatgcagaataaatgcaagggagtacaagggaattataacataaagggttagggttgcagtaaacagcatttaaagacatttagttgctcagggctattttgtaaacacgatcttagaactatgcaaagttgttaatcaaggccgtgaacccacacgaacctgccttaacccaaggcctacgatgattcagaccgaactggcaacccgaccctgggtcccagctcgtcctaagccaacccaggccaaccattccacattttagttgttaagcaagttttaagaattaaaacactaacttgggtacattgctcggcttgcccataaccgagggctcggctattcgaatagattatactctgatcagaggtgtacaactttacccacaagacacatctttctcacgtgcaaccacgtgccacataccaccacggtatacagacgaaagacgtgacatagtttccaacccatcctagccttagacaagagtaccgacccaatcctgcctacggccggaacccccgggacaggcaggcaagactgagcccctagcagcagggcaccaaccctctgccgtatgacatctcgactaccgggccgcagctcgtgtagccttcatttgccctggagaatgtccatcgacccccgacttcatccatctccaatccgtgtacttttgtttatgactagactgagccacaaactaagccttacccattagacatgtggaagtacggtagtgctttgcaacagaggcccgaagaccggtccttaaacggccgaggtgctactatcaaaaccatgcaccccgagcccagcctaaaaccattttaggggattttgaatagagggggcggtgtgaagccaattccacaataatccaacaattccagagtatccaggtgatatgaaataattcccaagtctaaagttgtaaaaccacctaaggttacctaattaaattgcgaagcatctacctaaaattatactagggataccatgagtagagtgtccactagttgaggttttgtttgtctagggtgaacaaggtagtaataataacaataacaataataatatggtcataacaaaggtaaataggcatggctaaataaaacagtgataacgcgggaatttaaataaagcgataatgccataatttaaatcaacataattttataaactgggattcaatatgatcaagatgatgtgtcttgccttgctcgttttcccaatcgacggcttcgacttccacgaagagcggatcttccgaagctgcagcgtctacacgaccaacggaaaagaaaaaggctttaacactaaataactccacataacagcagaaacaaagcacaaaaatgggttctttacatcttaaggaaaaattagagacttgaacggtccaattccgagttcaaatggccaagatatggccatttgaagtttatatgctctttaaatggatatttgcgaatttcttcatttaattttcaattaaaaaaaacccatttattgcgtcggccgagggaaggggcgcgcggaccgggtccacgggaagtggggccacgcgtcagccgctcggtccacggtggaccgggcgcacgcggctggcggcggtcggcgccgtgggtcccgcgcgtcagccgcacccgcgggcgcgggcggctgacggccgggcccacttggcagccgcgagggcgcgcccgagggcggcctcgccggcgcggccgacgggagcggcgcgcccgcgccccgatggtcaccgccggcgaccaccggcgcggcggagcggcgcccgagagagcggagagaagggggaaagcgaacggcggtcttcggctcaccccgggacaacgacgacgacgagaacggcggccggagtggaggaaagcggcggcgcggctcgggatgacgatggcgacggcgctccgacggtcggcggacggagcggagcggcggacggggtcggcggcaacacggcgaagcggaacggaggtgtcgccgagtaaggaggaagtccggagcggcggcggcggcggaacggagctcggcggcgatggcggagagagcggagcacggcgcgagcacgaatccgacggcgagagcgagcggcgagcggcggaaacggaagagcggagctcgggcaacggttttatagcgtcgggagggagagaaggcggccggggaggaaggaaaccgaccgcggagatttcggccgccatagatgcgccggcgatgaatgcgggaaggaaatcggacgaatccgagggagagagagaggggaaaacgggggaaacgggagagggaatcacggggagtgattcccctctctttaatgcgcgcggggacggcgggatgcggcgcaatccgcggcggcggcggcgctagggcacgggcgcggcggcgggcgcggcgggaggaaggcgatgacaggtgggccccacccgtcagcgagagtggcgggcgggcccgcctgtcagcggcgcgcgcgcgcggggaggccgatgggccgcgggggaggagagagagagagagagggagaagtgggccgagccggcccaagagggaagggggggaaaaagaacttcttttaggattttctttttataaacctttttaactttgttcatttcttttcaattattatttgtgctctgaaaattccactaaaatttgtttaagcattttaggcttttaggaaatatacaaaaatcctccaagcctcatttgacttttatctttgcacattttaattgttggaggctttcacattgaattttaattattctttgcacaatttcgaggatagatttttgtcacgcccagaaattcccgaatagaattccaagcagaatgtgtattaaaacccccgtccaggaccagccggggtacacaaacgacaatgttgacatacagatccacgtcttacaaacattataaaggtcttacagaaatgcagcggaaaacaaaagataactggagctaagccttgacttgaactgcagcgggaacaccactccacaggcatcctcgacggcacggacgaagcctactcctcggagaacccgccatcggacacatactcgagctctgaggttgggggggaaaagtagagcaagactgagtactacccactgtactcagcaagtcataccggaatagaggtatgatgcagggatttaacaagggatagctaagcaggttcatttgcataaatactggcatttataaacaggaattgaatgcgaaaacagttgtaataattaagcagtattaaacatccgctgtccaacgctaacccacgttgcgacaggcccaaccatccacctaaactatccaaattcaacagattacactagggtgagactaatcacggtgaatctggttgaccgcccataaccgcgggcacggctattcgaatagttttactctgatcagaggtgtacaactgtacccacaagacacagccccacgacacgtttccgtgcgccgacatgccaccacgacataccggaaagaggccgtgacaggacccttcgcataaccccctctagccaagcacaccacacctcaggtttcactcccgtccccagcgggcgacgggcagtcccctctcgtgcctaggtgaatccggaagcgacagaggccgtcgcagggcccgccccgctccatcacgcccacccttgcctggatgcgtcgactagaggaaagctacactacaagcccagccgttgcccacgctggcttgtggtaagtacgataaattcttccagggcatcccgcgaaccggtccttaactgccatgggtgcgactagcaaaaccatgcacccacagcccaccatgtggttcattttatttaaccaacaccagagcggtggtattaaaccaacattatcatataaacctatagtctaggttttaaatgagatccccaatgtgtgctagttgaactaagcatggctaagcaattcctagtccaaagtctaatcatgttataacccaagctaacaaaggagcatgatatccaaaagcatggctgtaacaataggtatccatcccatagtgatattataaaacaatgcaatatttgaaagaaaacagtagagcatttgcaatataggatcaacatgttcaagtgacaggcatgacttgccttgctctgctgctggagggacctcggcgactatctcgaagtacaccggagcgtcggagggatcggaatctagcgacatacaaagcaaacattgcaaacaggctataagactactgaaacagagaacaaaaccatttttaatggattctacacatttttcttgatttactgagacttgaatgggattaaacggagctcggatgaattagatatgaattttagaagattcactgtgtttattactataaaagaaatccttaaataatttattgcgcaatattaaccagggctgacgtcagcgagggggcgcggcgccgacatgcggggcccaccggtcagcggcacggggaggagagaggaggtggcggcgcgcgggcccacgggtcagcggcacgggggaaaggaggggcggcggcgccacgtggcggccgaaccgacggccccgatctacccaagggtagatcggacggcggcgggacctcgcggccggggcgcgcgggcgcggcgcgagacggcggcgaccatggcgccggcggcgcggcgctcacacggcggcggcgcgcatgcggcagcggcgcaaggcggcgaccgaaggcgaccgaccggcggcggggagcggcggctagaggaggagcggcggctacgcggctaagcggcgcgcacgcggctacacggtacggggaaaaggagaaagaggagggggaagcctcaccgacaacggtcgacgacggcggccgacggaggacgacgacgacggcgggacgagctccggaacctcctaacgaacaaaaggagagggattagagagagaggaaagagcgtgggagggcgagagcgccggccgaaggcggcggccatggtgccacttgccggcacacgacggggatgggtctccggcggcgaacctcgacggggaaggggcggccgaggtagatctcgaccccgcgaagctaacggcggcgacggcgcgagacggcgacgagcctagcggcggctagcggcggccggagtagcaaaagcggcggcggcgggtggttgcacggcgtggaggcgatggggagctcgggagagatcggcgaaatggggaaaaagcgagagagggggacggcgatgcttaaaaagggggagagggagccggacgtggccgggagcggcgggattcgacggccgacgtgggggagtggggaggagagagaggcgggattcggttttcgaatcccggccatctcgggcgcgggcgcgaacgggagggagaggggaaagggcgcgggagacgcggcgcacgcgcgggcgtggccgacgtggcccgggagagacggaggcgtgggcgcggcggcggtttcggcgcggcggcgcgccgggatcggcgggaggtgggggaaggacccgacaggtgggccccacctgtcggcgaccccgagagaggaggcgggcggcggctgccaggctgggccctcggcctgcggccggcccagcaaggaggagggggaggaaggaggggaatgggccggcggcccatccgaaaagagaaaggaggaaaaagggagggaaaagaaaaagaaaaaggaaaaggattttccctggaattaaaaattgcactttagtgatttttaattggttaaaattatttctagagctctgaaaattccactaaaaatcctgttaatgaatttcgacatgtagaattcaagaaaaattccacatgtcaaacccgattattgtttgcattgttttcttagggttttatcctgatttcctctgcattttcttggggtcatttgtaatttacaatttggcttgggaggaaaacttcggggtgtgacaaacctaccccccttaaacggaatctcggccccgagattcggaggagctggtgaagaggtacggatgggcggctttcaactcctcttccctttcccaggtcgcttcctcttccgaatgatgactccactgaactcggcaaaaccgggtgaccttgtttctggttctcctttcactggtatcaagtatgcgaaccggcttctccacatatgtcaggtcctcctggatatcgatgtgttccgaatcagcctgctcttcaggtacccttaagcacttctttaactgggaaacgtggaacacgtcatggatgccgatcatattggatggaagttctagctgataagcaacttctccccttcgttccaaaattttgtatggtcccacgaagcgtggtgccaacttgcctttcgtctggaaacggtgtactccccggagcggagtgacacgaagatacacgtagtctccgacctcaaaagttagctcccttcgacggttatccgcgtagctcttctgtcgagactgagcaaccctcaatctctccctgatgattctgactttctcttctgcttccgctaatacttctgttccgaacagttgacgttcgcctgtctgatcccagaaaagaggtgtgcggcacttccggccgtatagagcttcaaacggtgccatctgtagactggcctggtagctgttgttgtacgagaattccgcatatggtaagcttttgtcccaggctccaccaaaatcaagagcgcaagctctcaacatatcctccaagatttgattgacacgctcggtctgaccatcagtttgcgggtgataggccgtgctgaagtttaaacgggtccccaattcttcctgcagcttctgccagaactttgaggtgaactgactacctcggtcggatactatcttcttgggtaccccatgcaaacacatgatccttgcgaggtacaattctgccaatctctttcccgtataggtggtatgtactggtataaagtgagccaccttggtgagtcgatccacgactacccagattgaatcatgtcccgatgatgtccggggcagtcctgttataaagtccattccaatctcctcccatttccattccgggatttggagaggttggagtaaacctgctggtctttggtgctctgctttcactcgttggcaaacatcgcagagtgcgacgaattcagctatttctctcctcatgctgacccaccaaaatttctctttgaggtcttgatacattttagtgctgcctggatgaatggagtactgggtctgatgagcttcggtgagtatcagatccttcaattccttgtcgtccggtacacacaatctttctcccatccagattgtgccatgctcatcctcaaggaaatcccgagcctttccgactctcatgttctttttcagttctgctatttccggatcatttacttgagcggctctaacttgatccacgagcgtaggccgtgcctccagagcggctacgaacccgtgttcaacaattcccatgttgagatgttcaagctcctgtcgcaattcctcacacatgccctcgatgcatagagcagtgcagtaacttttccggcttaatgcgtctgccaccacattggctttacccgggtggtagtgaatactcatgtcatagtctttgattagttccaaccatcttcgttgtcgaaggtttaggtctggttgggtgaagatgtatttcagacttttatggtccgtatatacttcgcagcggttgccgatcagatagtgcctccagatcttcaaagcatggaccactgctgccaattccaagtcatgagttggataatttccttcgtgtggacgcaactgccgcgaggcatatgcaaccactctgccctcttgcattaggacacatccaagtccgtgacgggatgcatcgcaatagacttggaagtctttcgtctggtcgggcaggatcaaaaccggtgcggatactaatttccttttgagctcctcaaagctcttgtcgcactcagctgtccatttaaacttctcgtctttcttaagcaactgagtcatgggtcgggcgattcttgagaagttttcgatgaaacgacggtaataaccagccagtcctagaaaacttcgaatctgcgacactgtcttcggtggggtccacttggtaactgactccacgttcgatggatcaactgctacaccctgagctgtaatgacatggcccagaaatttaacttccgtcaaccagaagtcacacttgctgaacttggcgtatagctggtgctccttcaacttctcgagtactagacggagatgttgttcatgttcttcctcggactttgaatagataagaatgtcgtcgatgaataccacaacaaacttgtccagaaattccatgaacactttgttcatcagattcataaagaatgcgggtgcgttagtaagtccgaaggacataaccgtgcactcatatagcccgtaccgagtggtgaaggccgtcttcggaatatcctcttcccggattctcaactggtggtagcctgatcgcaggtctatcttagagaacactttagctcctttcagttgatcaaataaatcgtcgattcgcggcaaaggatatttattcttgattgtgacctcgttaagtgcgcgataatcgacgcacatcctctttgtcttatcctttttctccacaaaaatgaccggagcgccccaaggtgaagtgcttggtcgtatgtaccctttctgcagctgttcatcaacttgcttcttgacctccgctaattcgttggccgccattctgtacggtctcttatagattggagcggttcctggtgccaaatcaatccggaattcaatctccctcttgggtggcatggtggtgaggtcttcggggaacacctctggatactcgcagactatgggtatgtcctccaattttctcaagttcttctcttcggcgtccattgggatttccgtctcaatctgattcaacgaggctcctttctttggcgagactagagatttgtacaccacggtttctcctttctcattggtcagggtgactgtgcgattcgcacaatcaatgacccccttaaacttggtcagccaatccatcccaagaatgacatctaggtctttggattcgagaagaatgaggttggctagaaacggtgacctttgaatttctattgttatagaagggctgaattgaaccgaagtggagctattccctggggtatgaacccgcatcggtgtgctaagttcctctcttattaacccatgcatcccgacaaatttcttggagatgaaagaatgcgttgcaccagaatcaaaaagtactgttgcagggattgagttaacaggaaacgtacccagtacgacctctggtgctgcttgtgcctcctccgcagatgcgtggttgacacgagcctggataaaccttggtccggcacgcctgggcttcgggcatttgtcagcgaagtggccaagctcgccacagttgaagcaggaccctggttttgctcccgtctccttcttggcttgtgcgggctggcctgactgtgccggtgccatcggtgggcgtggagctgtaccgcggttgggctgacttccatggtggttctgactgccactagtgccctggtggaagttgctggggttgaatgggcggtgttgacgaacaatcatggtggtaggtccaccctgctgtccgggagtgaggcgcggtcggtgctgactaccttggttggaccggaactgcgccgcctttcttttcctgtccattttgttgcgctgatcctcctgacggattgccttgtcaaccagcctctcaaagtcggcgtagtccccagatatcagttggttggtcagctcgtcatccagacccgccatgaacttctcctgcttctcggcgtcggtgcggacatcctctggtgcatatcgcgcgaggcgattgaactcatggaggtactctgtcacagtcctgttgccctgatggagcgcccggaattccctcttcttttgtgccacgaccccgtctggcacctgtgccttcctgaagctacggcagaactctgcccatgtaacttcagtacccggtgggcgggtggccatgtggttgtcccaccaagctgacgcaggaccctgaagctggtgtgtggcgaaagcgaccttctcctgttcattgcactgcaggagattcagcttcttctctatcgcatggatccagtcatttgcctccatggggttggtggtgctggagaaggtgggtggcctgacacgtagaaactccggcaacttggactgagggggagggggaccaaactgctggtgctgctgttcggcgtgctgcatcatcctctggtgcatctgctggtgctgctgttgcatctgctgcatcatggctgccatcatctgagtctggtgtgccataacttgggcaagcgtcggattctcgggaagtggtggcggaccattgccagaatcactgttggggtgcacaccatccacgcgttcttcgccgttgctgccctcgcctgtcgtgcggttgccagtcctggtgtagaccatctggagggaaaagcagacggggggaaaaggagaaaaacagatgctcaagaactaagctttattatataggaattaaaactgcaattgttctgatctgaattaaaacacttaaaaagagcaaacaaaaatccttattaagacagccatatcataggcacatgatatcgaccgtcgactgaccccaaacaagcaacctaaacacacaaactaacaagcagaaactagacaatcgataaactaatgggaaaacgagcctaatgctcggaacggctcctgcggtcggtggagtcgaaagcgtcctcctgctcgtcacctggtccctctgaacgactcctggagcctgacagatcagtctcgccgctgccactgggagtagcggacaaccaacctccggtaccactggctggacctctggcggctgatgctggagcgaaggagagagtgaacgcgggagctggagctggagctggaggaactgcgggaactgccggagctgcgggcggaactggaggtgctgcgggagctgctggtggaggtgggttcctgggcgcaagctggatgcgcacgggtgcagtcgtcctcttacggggcgtagtgcggatccggactcctcctggtgctggaagacccttcaactgagcattctccttcttcaggcgcgctatctcgtccttcagagcgacgatcctcatgagcttcccatcattcaaggccttggtcgccttgtgcaggtccgagtgcatccggtccaatcccctcatcacagcacacatgtgaccgaaggtggtgtcgttctcgccagctgtcggacggaaggagctgacgccatcaccatgggctcgacgggggtggtagcggtacgccgtgtcgtggaagatgtagtcgtggcgctcccgtagtctggccatcatcaagtaggctgcctcctgacaggcgtgatctgctgtgcctccagatgcctcgaccgccatgttagcgaggcaagtccccacgtaaccatggacctccaagcggacacggtgaggaagctcgccactgagcggcggaatcgtcgtgtactccggcgcgtcggggtagcccaccaccagggtcatgcgtgccaactctgccacgaaatcaatcatgccttctccgcggtggttgggtgggtgaccggccatctagagaagacaaaggagtaggatcaatgcatgctcaaatccaaatttaaataaagcaataaagactcaaataaaggaatcaaataagagcaaaattttatgcatagatcattttacatgagcgcgaataaataagacagactcacataacgataaaataatgagaaattagatacatattaataataacgaacaaagcataaataccttgcaacccatgataccgagctaggaccgagtgcatttcacccatcaaatcccaactgactgacgaataaatcccaataattttactaaaaccctagactgactcgttttgaaaaactcactttaaacgagcgaccaagatttttcccttgaaccataagaacagatccccattttcccggaacaaaatccaattgcaaagaacatatgcaatgaaaaggattcagagggctcttaggtctttccatttggcttgtcctacggtcaaggtcggctctgataccaacttgtcacgcccagaaattcccgaatagaattccaagcagaatgtgtattaaaacccccgtccaggaccagccggggtacacaaacgacaatgttgacatacagatccacgtcttacaaacattataaaggtcttacagaaatgcagcggaaaacaaaagataactggagctaagccttgacttgaactgcagcgggaacaccactccacaggcatcctcgacggcacggacgaagcctactcctcggagaacccgccatcggacacatactcgagctctgaggttgggggggaaaagtagagcaagactgagtactacccactgtactcagcaagtcataccggaatagaggtatgatgcagggatttaacaagggatagctaagcaggttcatttgcataaatactggcatttataaacaggaattgaatgcgaaaacagttgtaataattaagcagtattaaacatccgctgtccaacgctaacccacgttgcgacaggcccaaccatccacctaaactatccaaattcaacagattacactagggtgagactaatcacggtgaatctggttgaccgcccataaccgcgggcacggctattcgaatagttttactctgatcagaggtgtacaactgtacccacaagacacagccccacgacacgtttccgtgcgccgacatgccaccacgacataccggaaagaggccgtgacaggacccttcgcataaccccctctagccaagcacaccacacctcaggtttcacccccgtccccagcgggcgacgggcagtcccctctcgtgcctaggtgaatccggaagcgacagaggccgtcgcagggcccgccccgctccatcacgcccacccttgcctggatgcgtcgactagaggaaagctacactacaagcccagccgttgcccacgctggcttgtggtaagtacgataaattcttccagggcatcccgcgaaccggtccttaactgccatgggtgcgactagcaaaaccatgcacccacagcccaccatgtggttcattttatttaaccaacaccagagcggtggtattaaaccaacattatcatataaacctatagtctaggttttaaatgagatccccaatgtgtgctagttgaactaagcatggctaagcaattcctagtccaaagtctaatcatgttataacccaagctaacaaaggagcatgatatccaaaagcatggctgtaacaataggtatccatcccatagtgatattataaaacaatgcaatatttgaaagaaaacagtagagcatttgcaatataggatcaacatgttcaagtgacaggcatgacttgccttgctctgctgctggagggacctcggcgactatctcgaagtacaccggagcgtcggagggatcggaatctagcgacatacaaagcaaacattgcaaacaggctataagactactgaaacagagaacaaaaccatttttaatggattctacacatttttcttgatttactgagacttgaatgggattaaacggagctcggatgaattagatatgaattttagaagattcactgtgtttattactataaaagaaatccttaaataatttattgcgcaatattaaccagggctgacgtcagcgagggggcgcggcgccgacatgcggggcccaccggtcagcggcacggggaggagagaggaggtggcggcgcgcgggcccacgggtcagcggcacgggggaaaggaggggcggcggcgccacgtggcggccgaaccgacggccccgatctacccaagggtagatcggacggcggcgggacctcgcggccggggcgcgcgggcgcggcgcgagacggcggcgaccatggcgccggcggcgcggcgctcacacggcggcggcgcgcatgcggcagcggcgcaaggcggcgaccgaaggcgaccgaccggcggtggggagcggcggctagaggaggagcggcggctacgcggctaagcggcgcgcacgcggctacacggtacggggaaaaggagaaagaggagggggaagcctcaccgacaacggtcgacgacggcggccgacggaggacgacgacgacggcgggacgagctccggaacctcctaacgaacaaaaggagagggattagagagagaggaaagagcgtgggagggcgagagcgccggccgaaggcggcggccatggtgccacttgccggcacacgacggggatgggtctccggcggcgaacctcgacggggaaggggcggccgaggtagatctcgaccccgcgaagctaacggcggcgacggcgcgagacggcgacgagcctagcggcggctagcggcggccggagtagcaaaagcggcggcggcgggtggttgcacggcgtggaggcgatggggagctcgggagagatcggcgaaatggggaaaaagcgagagagggggacggcgatgcttaaaaagggggagagggagccggacgtggccgggagcggcgggattcgacggccgacgtgggggagtggggaggagagagaggcgggattcggttttcgaatcccggccatctcgggcgcgggcgcgaacgggagggagaggggaaagggcgcgggagacgcggcgcacgcgcgggcgtggccgacgtggcccgggagagacggaggcgtgggcgcggcagcggtttcggcgcggcggcgcgccggggatcggcgggaggtgggggaaggacccgacaggtgggccccacctgtcggcgaccccgagagaggaggcgggcggcggctgccaggctgggccctcggcctgcggccggcccagcaaggaggagggggaggaaggaggggaatgggccggcggcccatccgaaaagagaaaggaggaaaaagggagggaaaagaaaaagaaaaaggaaaaggattttccctggaattaaaaattgcactttagtgatttttaattggttaaaattatttctagagctctgaaaattccactaaaaatcctgttaatgaatttcgacatgtagaattcaagaaaaattccacatgtcaaacccgattattgtttgcattgttttcttagggttttatcctgatttcctctgcattttcttggggtcatttgtaatttacaatttggcttgggaggaaaacttcggggtgtgacaattttagagtcgttttgggacgcgacaaacctaccccccttaaacggaatctcgaccccgagattcggaagaactggcgaagagatcgggatgggctgccttcagttcgtcttcgcgctcccaagtagcttcttcttcggcgtggttgctccactggaccttgcaaaaacggattactcggttcctggtcctgcgctccatggtgtccaggattttcactggcctctccacataggtcaggtcttcgcgaacttcaatttgctctgagttggcctgctcggatggcactcggagacttttcttgagttgcgacacatggaacacatcatgcacgttacccaaggaggcgggcaactccagctggtaggcgacttctccgcgtcgagcagtgatacgaaagggacccacataccgaggtgcgagcttccctttcgtctgaaacctgtgtacacctcgcaatggcgtgacccgaagatacacaaagtcatccactgcgaattccaggtcacggcgacggttatccgcataacttttctgccgggactgtgccacctttagattatcccgaatgattctgactttagcttcagcttctctcaggatatcagtcccgaacacttgactttctccaacttggtcccacaatagcggtgtccggcatttgcgcccgtacaacgcttcatatggtgccatttgtatgctggcttgatagctgttattgtaggagaactcggcataggggagactcttatcccaagtcttcccgaaatctaggacacatgcgcggagcatatcttctaggatctgatttagacgctcggtctgtccatctgtctgcgggtgataggcggtgctgaaattcaatcgggtacccagctcttcttggagcttcttccaaaagcgagaggtgaattggcttcccctatcagatacgattttcttgggaataccatggagactcacgatcctagcgaagtagagttccgctagtttattccctccataggtggtcttcacaggaatgaatcgagctaccttggttaatcgatccactattacccatatagagtcatatccaccttgggtttttggaagaccggtgatgaaatccatcccaatttcatcccatttccattccggcacttggagaggttggagaagtccggccggtcgttggtgttctgccttgacacgctggcacacatcacatagagccacaaattctgcaatttcccgcttcatgctaacccaccagtatttctccttcaagtctaagtacatcttggtactgcccgggtgaatggaataaggactttcgtgagcttcctgaagtatcagctgtttaagttctcggttatctggaacgcatacccgctttccgttccatagggttccgtgttcatcctctgtgaaaccagcggctttaccctgtttcatattcttgaggagtccatgcatgtccggatcattcttctgagcctcgcggatttgatcgagcaaggtaggcttggcttccaacgcagccaagaatccgcgaccaactatgcttaggttcagggcttccatctgttgattaagctcgggcggaatgctacggacgttaagagtattgcaatggctcttccgacttagagcgtcggcaaccacgttagccttaccaggatgatagtgaattcccacatcataatccttgatgagttctaaccatctcctttgccgaaggttcagatctgactgagtgaagatgtatttcaaactcttatgatcagtatatatttcacagcggttcccaatgagatagtgccgccagatttttagagcatgaaccaccgctgctaactccaagtcatgtgtagggtagttgccttcatgaggacgtagctgacgtgaagcataggctaccacatgaccgtcctgcatgagtacgcaccccaatccttggcgcgaagcatcacaatacaccatgaaatccttgcgagtatccggcaagattaacactggcgaggaaaccagcttttccttgagagtttggaacgccttctcgcactgcgggctccacacaaatttctcttctttcttcaacaactgtgtcatgggtcgagcgattttggagaagttctcgatgaatctccggtaatatcctgccaaacccaagaaactgcgaatctgagtgactgtcttgggttgcttccaatcggtgacggcggtcactgtttcggggtccacagcaactcctttagcagatatcacgtgccccaagaatttgacttcggacaaccagaactcacacttgctaagcttggcatacaattgatgttcccgcaactttcccaacaccagacggagatggtgctgatggtcttcctctgattgtgagtatatcagaatgtcatcgatgaaaaccacaacgaacttatccaagtattccatgaacactttgttcatcaagttcatgaagaaggcaggagcattggttaagccgaacgacatcaccgtgaattcatataacccgtatcgcgtggtgaatgcggtcttcggaatatcttcttcacgaatacgtaactggtgatatccggaacgaagatcaatcttggagaatacagtggcacctttaagctgatcgaacagatcatctatccggggaagagggtacttgttttttatggtgacttcattgagagctctgtagtcgacgcacatcctcttcgtcttgtctttcttctctacaaaaatcacaggagcaccctatggggaagtactcggacgtatgtaccccttttctttcaactcttccaactgtttcttaacttcggccagctcatttgctgccatacggtagggtcgcttgtacagaggagtggttcctggagcaagatctattcggaactcaatctctcgcttgggcggcataccaggtagttcttccggaaacacgtctccgaactctctgactatggggatttctgacagttctatctgatgaagttccgaacttctgacagaggttgagggtgcaaagaaaacaaccggttgttccggtcctcggtacagagtgacagtgcgcctcgcgcaatccactaccccttggaattgggccaaccaattcatcccaaggatcacatccaagttctttgtgtctagaagaatcagatccgagggaaaaggaatcccctgaatttctataggaacggcagggctataatactttgctgtcataacccctccaggggtggtgatgagcagagggtttctaagcctttctacccccaactgatttctccccacgaatggcacagatataaacgagtgggaagctccagagtcgaacaaaattgtagcagggatggaatgaacgaggaacgtaccaacgatgacgtctggagttgtcagcacgtcctcggccgtcacgtgattcacacgaccccgaatgacatccttcccgccgttgttggagcggggaggtgcttggccttgctgacgccttggcttcgggcatttatccgcaaagtgcccgggctcgaagcagttgaagcacagacgctgctgaccttgagcgtccctgcggccttgaacgggctgcacagctggcgtaggaggacggggtgcacgagtcccttgctgattctgctgctgctgtggctgtgggacgcgcaccacgaattgaggtcggggcgctgggcgaggttgctgctgctgctgctgctgcgaggaggatccccctgggtagggattggtgtagcggaccctctggttagcaccctgttgattgcggaaattcgccaagcggcgcttgtgcgattccagctccttgtgcttggcttccaagcggatgctcttgtccaccagtcgttgaaaatcaggatagtccccagagactagacgaacggacagctcagggtccattcctgccaagaacttctcctgcttctcctcgtcttcccgcacatcctccggggcataacgggctagattgttgaactcatgcaaatactccatcacggagcggttgccttgcttcaactcccggaattccctcttcttgagagccacgactccggcgggcacatgggttctccggaaagcggcggtgaagcgagcccaagtaatcggttgcccctctggctgcgtagcctggaaatggtcccaccatagagatgcgggtccctgcagctgatgggcggcgaagacgactttctcctcatcgctgcactgcaccgtgtctaacttcttccccacggcatgcaaccaatccaaagcatccacggggttgttggagctggagaaggtaggtgggcggatgcggaggaactcggcgagtttagagtgttgtgggggtggtggtggagcattctgttgtggcgggttttggaggtggtggaggaaagcggtcatcatgttggcttgctgggcgaggatttgggtgagaatggcgttggtgtctggcggtggtggcggaggtggattgccttggtggttggggttgctgccttcgggttggttgccttcaccggtgttaacatttctcctggtcgtcaccatctgaaaaccccacacggaaccagcaaacagagaaggagctgacgattaaaactaaccacccacgactaccattattcttaaatttatcactgctattaaattggttcattaatgttcaagttgcttaggcaaataaaataagacaggctccgacatagatacaccacacaccggtgtaaccatgccccacacaactcaaaaagacaaacgaggaaaaacacacgcgcaagcctactaactgctcgtctaccgctgcgacgggccaggacggaaggtgagcaacagcgcaccctccgagctaccaacgccggaggcttccccctcctggggaaccacgggcgcaggctcggcacgaggggtctcgacgaagcaagtccacgccagggactgacgaacaagctcgggcctggaggtgctcttgcgggcggtgatcttctggctgcggcagacgcggcgacgcttgggacggctgatctctccctgggcgatcttgagctggtgcagctgcgcctccaacgcgtcgaggtccttcttgagctgcaggttctcctgacgcagctccaggatcttcaggttgttctccaccatgccacggcgcaccatctgatggaagtcgatacgagccgcgtcgtacgcctccaccatgcgtgccagatgcacgacggtagcgtcatcctccgagctggcgtctcggaaggtggcgtagtcgcgggctcctccgcgacgagggtggtagcggtagggcgagtgctgcaactcgtccgggtagcgctggtgaagagtgccgatggcgaggagagcggcgttctggcaagcggcggggaaggagtctccacccgcggtgactgccagcgaagtccgctcgggagagccggagaggatcactgcagtgacctcccaaccagcgtgaggctctgcatcctcaccctcctgctccgggagcggcctggcctggtaatccactccatgtggataccccaagaccacgcacatgcctcgcagctccaagacgaagccagtcatgtccaaaccacgacgggtaacgctgccggccatctacaaacaaaaacaaaaagagaaacaacattttaaaggccagattttgatgataagtgaagcagcaagacagagagagactagacagttttcacaaataacaaaggatttttatttttgaaaatattgctaaggcttgggatctacggctcgtcctagggtcaaggaaggctctgataccaacttgtcacgaccggaaataacccaacgggcattccttacgtgcgtgcattaatccttgtcccaggaggcaaggtacaccaaaagttgatacaattcagagtttaacaagcggaagcgtatataaaattattacacgggcagcgaaggcccaacacacgaagacaaacgaggaacagcggaagactagggcgacgaccacaggcgcttgacggcaggcacgagctagacaccgaagccttcatcttccaggaactcctcatctgggcttgggaaaaattgagcaagactgagtacaaccaccgtactcaacaagacacacccacaaatgcagaataaatgcaagggagtacaagggaattataacataaagggttagggttgcagtaaacagcatttaaagacatttagttgctcagggctattttgtaaacacgatcttagaactatgcaaagttgttaatcaaggccgtgaacccacacgaacctgccttaacccaaggcctacgatgattcagaccgaactggcaacccgaccctgggtcccagctcgtcctaagccaacccaggccaaccattccacattttagttgttaagcaagttttaagaattaaaacactaacttgggtacattgctcggcttgcccataaccgagggctcggctattcgaatagattatactctgatcagaggtgtacaactttacccacaagacacatctttctcacgtgcaaccacgtgccacataccaccacggtatacagacgaaagacatgacatagtttccaacccatcctagccttagacaagagtaccgacccaatcctgcctacggccggaacccccgggacaggcaggcaagactgagcccctagcagcagggcaccaaccctctgccgtatgacatctcgactaccgggccgcagctcgtgtagccttcatttgccctggagaatgtccatcgacccccgacttcatccatctccaatccgtgtacttttgtttatgactagactgagccacaaactaagccttacccattagacatgtggaagtacggtagtgctttgcaacagaggcccgaagaccggtccttaaacggccgaggtgctactatcaaaaccatgcaccccgagcccagcctaaaaccattttaggggattttgaatagagggggcggtgtgaagccaattccacaataatccaacaattccagagtatccaggtgatatgaaataattcccaagtctaaagttgtaaaaccacctaaggttacctaattaaattgcgaagcatctacctaaaattatactagggataccatgagtagagtgtccactagttgaggttttgtttgtctagggtgaacaaggtagtaataataacaataacaataataatatggtcataacaaaggtaaataggcatggctaaataaaacagtgataacgcgggaatttaaataaagcgataatgccataatttaaatcaacataattttataaactgggattcaatatgatcaagatgatgtgtcttgccttgctcgttttcccaatcgacggcttcgacttccacgaagagcggatcttccgaagctgcagcgtctacacgaccaacggaaaagaaaaaggctttaacactaaataactccacataacagcagaaacaaagcacaaaaatgggttctttacatcttaaggaaaaattagagacttgaacggtccaattccgagttcaaatggccaagatatggccatttgaagtttatatgctctttaaatggatatttgcgaatttcttcatttaattttcaattaaaaaaaacccatttattgcgtcggccgagggaaggggcgcgcggaccgggtccacgggaagtggggcccacgcgtcagccgctcggtccacggtggaccgggcgcacgcggctggcggcggtcggcgccgtgggtcccgcgcgtcagccgcacccgcgggcgcgggcggctgacggccgggcccacttggcagccgcgagggcgcgcccgagggcggcctcgccggcgcggccgacgggagcggcgcgcccgcgccccgatggtcaccgccggcgaccaccggcgcggcggagcggcgcccgagagagcggagagaagggggaaagcgaacggcggtcttcggctcaccccgggacaacgacgacgacgagaacggcggccggagtggaggaaagcggcggcgcggctcgggatgacgatggcgacggcgctccgacggtcggcggacggagcggagcggcggacggggtcggcggcaacacggcgaagcggacggaggtgtcgccgagtaaggaggaagtccggagcggcggcggcggcggaacggagctcggcggcgatggcggagagagcggagcacggcgcgagcacgaatccgacggcgagagcgagcggcgagcggcggaaacggaagagcggagctcgggcaacggttttatagcgtcgggagggagagaaggcggccggggaggaaggaaaccgaccgcggagatttcggccgccatagatgcgccggcgatgaatgcgggaaggaaatcggacgaatccgagggagagagagaggggaaaacgggggaaacgggagagggaatcacggggagtgattcccctctctttaatgcgcgcggggacggcgggatgcggcgcaatccgcggcggcggcggcgctagggcacgggcgcggcggcgggcgcggcgggaggaaggcgatgacaggtgggccccacccgtcagcgagagtggcgggcgggcccgcctgtcagcggcgcgcgcgcgcggggaggccgatgggccgcgggggaggagagagagagagagagggagaagtgggccgagccggcccaagagggaagggggggaaaaagaacttcttttaggattttctttttataaacctttttaactttgttcatttcttttcaattattatttgtgctctgaaaattccactaaaatttgtttaagcattttaggcttttaggaaatatacaaaaatcctccaagcctcatttgacttttatctttgcacattttaattgttggaggctttcacattgaattttaattattctttgcacaatttcgaggatagattttagagtcgttttgggacgcgacactcacactgcagtggatgtacactttacccacattctgcgactgcccaacacatgagccttgtctcaacacatgagacgcgtcacggcaaagcctttcgataacctcgcattggcagtacccgctccatgaacttttcatcctcatgcactctaggcgtacacggtttctagcagtgagaggagttctggcgcacccaggaagggaagttttacacccatgcaattaagttataactaagttcaactcaacacacgacagtcctaacaatggcgacaccattgtagagcccctgccttacacatgagaaaccactatgcatggatactgcttccgctcggctattaactccgctaggtctatccccattcgagaaatccggggtcgtttcatgcttaacttcatggctcggtccttaattgaccagggacggtactagcctttcccggataccacccaaatccaccatccgccccggtctaaaacataggtttttaattcctttcatgtcaccattatcatggcaatgtggtgctcatgcctccacatgccgcatctcaattaccttcccaaaggtaattgcccaagcatatagcatttgataaatatgaacatgcaagattctagaatagcattttctaagcaagtgtcataattgactagggactcatacgtaattatggttacaaggatttgaaggaaaacaataacaaggcatggcataaccacaagtgggatgttgatcattgcatgcaatcttgtttgtaaacaaaattaatttcgcaattgggatcaacgtgatcaaggaatagtgatgacttgccttgctcgaggtcttgtgggtcttgaccttcgcccggatccgcggctccctcggtctctgtagttacgtgcgtaagaacaatttgaattcgattagaattcaaataaaaatccaagtaaatccaaatggaagtcgaatgcgaaaatcaattctcttatattatctttactattcgcgaattagggcgaaccccattttgatttaaactattttgcgtgtataaatattttgttgtcataagtttttaatttaatcaacccgatcaatataccaatataataggctagaaatttctattgcgagctaaacatcggacgaaatcctagaaatattatacgacttaatttagtctatgattaaatataatacacggctaaaatccctagtaattaaatacgaattgctaccgttaatcgattacttatagagattacccaaaaataatccataataatttacgagaattcatacatttgtttagttattaattacatctaaattactaccgcgaattgatttcttatagagattactaagaataatctataattaaattttgcaattctacgactataactaatctataatcatactctaattattttaaattttctaaacttcccaatctccctctaattccctatttacttctttttttcctttttcttttcttccctttctttttcttttctttttctctttttctctcttctctcttttctttcttttctttttctctctcctttcctttctcctcccggcttccttctctcttcctctcttcttttctctctctctctcggcttcttcctcccgggcggcgatgacgatggacgcagggggggggggggcggcggcttaccgacagcgacggtcggcggcgacgacagcgacggcggcgcacggcgcggcggctccgaggcgacggcgcggcggcttcgaaggcggcggcgcgatggcatggcaacagcggcgcggcggcacaacgacggcggcgcgtggagaagagaaagaaggaggggaaagatggggatgggtgtggagaggcttggggatggaggggaggggtttttgtagggcgtggagaggaagaaagggaggggaaggaagagaggggaagggggagacgagacggcggtgcggggctcggggtgagggcgcactgcatggggctcggggcgggacgcgacgggcggcgacgcgacgggcgacgcaacgggcgacggtgacgagacggccgacagtgacggcgcgcggcgcgacagcggcgacgcgacgggcaggcggcagcggcgtcgcgcggcgcgaggtgcggacgcgatgggcgagcggcgcacgggcgagcggcgcgcggggcgcggggcgcgaggcggcgacgcgacgctggcgcggcgcggcagcagcgatggcgacggtgcgcggcgacaggtgacgatggcgcggcggcgcggggcgcgaggaggggggacgcacggcgcgaggcgcggcagcggcgcggcaggcggcgagggtgacggcgcacggcgacaggcgacggcgtgcggcacggcgcgggctcggcgcggctagggcagcggtggggagaggggaggaaggctaggggacatcgtcgaacacgtgtggcggccgatgaacagtggttttttctattaaaccgatttttgtgtatttcccatataaatttaattccacaattcctaatttttgcatatatgcattttactcaataattgtgttatctcaactaatgaactcaccctagattaatatcacacatttattattattattattattatttatataatttatttgaagttttttaattagggttaattattattccatcgtatttaaatttaattgatccaaatatggtcgcgacaatattttatttacttctatccacacctaatctttattttaatttatatttattttaccaatttatttttaaggtttatttctaattaactattctttactcacgattaataaacttcgagatcaaatccaaaaataggcgaataagatcagcatgatgcaattgatttaaaaagtttttgaaaatccgtatttttagagttttggttttatcggtcgaattttcagggtgttacaacatcttataagggaacctgtatggctcgggcgcccgatcatttcgagaaattcggtgacgtcagcgcccgatttacgtgcaaaaactcctttcaactgttttttctcttaaattacttatccaaattatgatccaattgcaccattaaattcattgcaattaaatcttcaaaacaagaccacacatggatatattccgacgaaaaatttttttagcttatttttgaattatttttaaatgttacacgatgttccacctggtatatcgaaattatttcactaagtagatcgaaaatgtttcactcgtttaaatcgagtgttgtttcaccttatataaaaacaatgtttcagcaaatagcgaaagattgtttcagttcactgcaacatttaatctatatatagtgaaacattataagtacaataggtgaaatatttttcggtggaacaaaaaataaaacgaattcccttaataggggtttccaaaatatgtaggtttttttgttgcaatgaaagatttcagttcactgcaacattagatctatacatagtgaaacattgtgagtacactcggtgaaacattttttgtggatcaaaaaataaaccaaatttctttaatagatggtttccaaaatatgtggttgatttgttgcaggtgggggcagatattatggtggggcctaacgacatcaccgcgcactgaggcggggcggggggagcgccctatttttgctccccccgcccggtagcccgaagacaagtattctcgatcttataacgcaatataattatgagtggttggacaagaaccagcaggtcatcgacagcttccccggcgccaacacgtggtggaaccagctcaaggacaagcgggaattgaaagcacaagctggtgttcgtgttccacaagcgccaccgtgagctcatgcagagcccctacctgcgcgacataatcctgcgggggcacgagccaggaaccaagagccggctcagctgagagataggtggctcttcaccaactgtggcagtggtggtaatacgatgtggtcctgtggagccacatcccgtggaaacatgcacccagccacgttcgttccacactcgccatggaccccgccaagaaggatgagatcaagcacgtacgttgtttcgggaggggaagaaatagcacttcgacgttggaagcgtggcttcctgctgtacggtccatccggcagaaagtgcagcatgatctcggctgtatcccactccctcggctacgacgtctgtagcatgtttagttctaaaacaaaacattttcacgctgtcatatcgaatatttagacatatgtacagagtattaaatatataaaataaaaaaataattacacagattacgtgtaaattgcgagacgaatcttttaagcataattgcgccatgatttgacaatgtggtgctacggtaaacatttactaataacggattaattaggcttaataaattcgtatcacagtttcctggcggaatctgtaatttattttgttattatactacgtttaatactttaaatgtgtatccgtatatccgatgtgataactaaacccaaaaaattttcccaactaagggggtgttaagatccaagggtgtgtaaagttttgtcgtgccacatcgggtattatataaagtgttgcatagggtgttcgggcacttataaaaaaaaactaattgctgtaggatcacattgtcaaatcatggagcaattaatccgtcattagcaaataaatttattaagcctaattaatccgtcattagcaaatgtttactgtaggaccacattcgcaaattattcgcaaattagtcgcaacctatgcagatagttattttttagcttatatttaatacttcatacaggtgttcaaacaagaaccgggaataaagaggtttttttgtcccagtttattactccaacgggattaagtgatctttagggctggttttccctctgacagggcgtgtcagactcctgtcggggggctggggaactaaccccatccgggactaaagatcatctctttagtcccggagatctttagtcccggttggtgacccaactatatatatcctttcttcctcctccagcccaagtcattgctgcaaaatggagctttgagggagggaggtgctgccaaaatttttaataaatttttttgttgataatatacaaatcggaggaatcgagaaggttagcaacttcattatctaatgatgtgtgtttagcatgttacatttatggctttgtttgtattcaatattttctccaacaaggtatatgggtgggaaatgatgagagagaaaacttgttgagggaaaattaggttaaaataatttggataaatatgttatagaaaagttgactgttatcgaaacgacaaccgcatacgttgaaagacgtggttactaaacagtggatggaaaagaagtaaagtgtattaatttgagaatttttacttgagatccccctattacatggccctacgggggctatttatagcccccattacaggtcttactactagggctttagttatacaggggaatttacatggttgcccttatgaaagggacatttacatgggtacatagcgtaattgcggtccatgggcccttagcgagccgacaggttattgtcgacccaattaacccttgggcttgatgggccaggacagattcttcggccctcccggggccgaacctgctacggcgaagtcgtcccccttcggcatatgctcttcgccttgcgcaattcgcccaggaggcctctagcttggctgctctttgctccatagtttttgacatggggagggttcgcctcgactaaccctgacgtctcgggcttgaatcctcatcggtcgcatgttttcggcaggtttggtcgaagggtctcatgccatatcgccaacattgacaaaggaaaaaatataaacaactattgaaaaacaatgaaggtatgtttggaaatttaaaaataatgaaaaaatggatactttgtggaattattgtataattattatatgattatttgtacaaaataattgaaaactaagttaattggaaaatagtttaaattattgtatgattatttaatgattttaaggatgatgttttaaattattgtatgattatttaatgagtttgtctttcgtggatttttttttaagatttcaggtagatggatcggcaatggatgtacgcggactggcagtcgaaagagtttattaacgacgtgcattactttttgagtgtggccaatgataacaagcgtaacggttttatatgttgtccatgcgataagtgaaaaaaccagaaggagtattccactgcacgaactattcattcccacctgtttcagtgggggttcatgcgtagctacaattgttgaaccttgcacggagagctaggggttgcaatggaagaagatgaagtagaagacgagaacattccggacggggctttgtactagggatttgaagaaaacacaatgggcgaggcagacgtagatgttgaagataatgacggtgcagatgatcttggtcaaatgttgcgggacatacctgaggactgcgaaagtgaaaaggaggtgcaataactagagctcatgttagcggaccacagaacgtcgttgtacccaggttgtgagcagggccacaaaaatttgggtaccacgctgtaattcttgcaatggaaggctaaaaatggtatgagtgacaaggcattttctgagttattggagctcgtaaagaacattcttccggaggggaacgaattgcccgaaacaacgtacgaagctatgaaggccatctgccctctaggactggaagttcagaagatacacatgtccgaacgattgtatcctctatcgcggtgaggtgcacgaaaacctgaaagcatgccctgtttgcaaagcactacgatacaagattagacgagatgatcgaggcgatgttgaaggacagcctttgaagaagagagtttctgctaaggtgatgtggtatttccctataataccatggctgaagcggttttttgggtataaatcacatgctagaatgatgcggtggcacgtagaagaatgtaaacaagacgggatgctgagacaccccgtcgacgggtcgcagtggctaaatatcgacagaacatttaacgacttcggagagaatgcatgaaacgtgaggttcggtttaagtacggaaggaatgaatccgtttggagagatgagcagcggccatagcacttggccggtcactgtgtgcatctactatctcccaccttggctatgcatgaagcggaagtacatcataatgtcgattattattcaaggcctgaaacaacctggtaacgacattgatgtgtaccttagaccattggttgaagatctgaaagtgttgtgcaggaaagagggcgtcctcgtgtgggataaggacaaataggagcaatttaacctacgagcgttgctatttattaccattaatgattggcctgcacttagtaacctatccggacagtcaaacaaggggtacaaggtttgcactcactgtatggatgaaaccgaaaatacgtatctgaagcattgctggaaggttgtgtacatgggccatcgtcgattccttgttgcaaaccaccgtgtacggaagaaaggcaggcacttcgaacagaaggcaaaccaccgtactaagcctaaacatcacaacatgaaagcagtgtttgatatggtgaaagatctgtaagtaatatttggaacggggcctagaagccaacctatatagagcgaagatggtcacgcggtgatgtggaagaagaactctattttttgggagttaccctattgggatgtcttagacgtctgccacgcaatcgacatgatgcacctcactgagaacctttgcgtaaacctgctgggctacttaggtgtatatgggaaatccaaagatacacttgaagcacgtaatgatcttaagcatatggaacaacgcgagagccttcatccggaaccaactgagaaaggaccatagccctcaattgttgcgtggctgcgggctgaagggtcaaacgacccgagaccctcacggtcgtggttgtaggatcacacaggaccaaacaaacctaccagaggggttgaatagtagggaaaaccaaaaacccaaaaatcttatgtggaattaaagattaccctcaaacggagttgataacgaagccctgtcgccgtcggtcgaaccacccactcgccgccggtcagaccgtcgtatcgtagccccgccggtcacaacgctgctatcccaccggtcagaccacacacacacctgcggttagaccgtcgggacccagaaacactggtagatgacaaactcgaagatgtagattgaaactttttgactttattgcatcaactagtgtttacaaagtgcaccaacagcactccttaccaaaatctcgaattaaactcgaaaccctaactttctcgcaactctaatatctgtaaaaccgatactgggaggcctcaccctccctatctttttatacatgaggtaggctgtgcaaagcccacgaatctaacacaacttacgactcctaactcacgtaggaaaccctctcttgcaagtatccaacttatctcttgccttatctcaaacaatcttcccgaattcggactcccttccaaattcgactcctctttccatatgtacacaaatcctcttgtataccatatggatttcttcatcaccacatgcattgtcctctagcctttagtatcccgcatgatctcttaatccctggacatcaacttctcccaatttgactccgatctatcaccggtaacactctcccgaggtctcaagcaacaactgcacatgcaacaaccaagaaaccatattccgagcccaagttagtcccaacttgactcacattagtataacaacaatattcatatgcatagaaaccatttagaagccaaatccccgaaggaaacatccaaatccaacaaaacaacccgaaaccgaacatgatcaggatcctgccggtcagaccgtcgggccggccggtctgaccgccgcaacacctgtggtctgaccggcggcacacgaccggtctgaccgccaaggtcaaccgaaactgcacacttcataaaatcaatcgtcttataaaatctctaaattaacattagcaaaccatcaatattttcttcacaaaatctaaattaactcctttattttatagtggtgtcctcgatgcatatgtgtctcgtccaggcacgcggttgacgcgcaccatcggtggtgccggggctctcaacgcacgccggaaaagacggagccatctcccgaaacgagcgtcgcgccagggcacgtcaattcgcgcgccaatccatctctcgaaccgaccgttgtgccaaggttccccggtgccgcatcacgtgcgccgtgcgttagggccccacctgccgtcgatggtgagggcaaagatagcagccgccgccgtccctcagactaggacaccccactaatccaaaggaaaccctaaaaaatccctcaatgtcgagctggaccacaaatgaattagatgggcctcaccatcacgcggtgactggtggctgtgtgtgagatggtttgggctctgtttaatcagactatgttgtgtttcattatcagctcggaataagtacacttgagatcccttaacttatcaacaaatccgattttcgtccttcaaccgaaaaaccagatacaacgggtccctcaactatcaaaaccggtgcaaagcaggtccctcagcggttttgatagtggttttggccgatgtggcatctacgtgtcctgtttgcgtcctacgtggcggtgacgtggcactggaaggaaaatataaaaattaaaaacaaaaacaaaaatatgaggtccacatatcagttagacaaaaggaaaaaagagtggacccacctgtcagtgggtcctaccatcctctctatccacaaacgattggacgacgggagactgggagagggagcgaccgacgcctcttgtctctccctcccggcatccatcctcgccggccggcgagcgcgcacggagagggaaaaaggcgccggccggcgagtggggcggagacggcagctggcccccgcccactgcgcacttcttcggcggtctgcgacacggagctagggttgcgggagtcggagggtggcggcgccatcatcctgctcgaacaatcggagagacggcaacgacgaacagtgttcatgcaacagtgtgattacctggccggcgacgaactcagtgacgatgcggctgccgccgaggacgagggtattggagacgttgacgccatgctcggcggtggcgtccgtggactggtcatgtccgatgacgcccatctcctcgttacgactcgccgcggactccatggcggcggccgggccgcccttgaccgtcttccccaacacgaggttctccgcgcgccgactgcaagtcgccgcgtcccgcggcgcgatgggcttggccgcgaggcttctggtcaccggaaacacgtcgccataccagatcccttgctggctcatcctactacactctcaaagtagctagtactagtgtggtgagatcgtgtgtgcactgtgctgtgcatgagagagagatcttcaaggtcatatgcggcgcgcctcgctgcatgggtcgaacgggggacacgcagggtggccggcaatggcggggcgccgtgggtggggcactggggctcgacggcgacgggcggtcgcagcccgccgaagaggcgcgcagcaggcgggggccagctgccgtctccgccccactcgccggccggcgcctttttccctctccgtgcgcgctcgccggccggcgaggaaggatgcgggagggagagagaagaggcgtcggtcgctccctctcccagtctcccgtcgtccaatcgtccgtggatagagaggatggtgggacccactaacggtgggttcacttttttctttttgtctgactgacatgtgggccccacattttgtttttattttttagttttatattttccttccagtgccacgtcagcgccacgtaggacgaggaccaagtcaaaccggccacgtaggcgccacattagccaaaaccaccatcaaaaccgctgagggacctgctttgcaccggtttgatagttgagggacccattgtatctggttttccggttgaaggacgaaaatcggattcgttgacaagttaagggaccacaagtgaacttattccttatcagctcagaagtgatataatgcactgatccatcgtcttacaactaatgatgatatagaagcgtgaggtttgagctttaggttttgatttcagttagtggccattagcataaagacagagatacagataaatataaaaaatttccccatgtgaccatgtcaaagcatctagaataatggttgctgactaggaggaagaagcccaaagtttcctgtttggctgtttgccggatgctaggaattgggccatgctttcctagcctggtccaaggcggtggtcaggcacagcccgatttcaggccgtacataggccacgctcgtgcttgggactttggcgtgataggtcgccgcatagcacgttgttagcctaatcctaatagcccgccgagtcatgtaggccagctagagacatcgggcccgtttactttgatgtcattttcaactttaccaagttttggtaaagttataaaaaaaaaaattagctacatttagtttgttgtcaaattttggtaactatataaaaaatcctgctaaaatttagtaaggttttttttcgttagagtgaacagccccatcatatatatccgagttatgaggctcctggcccagattggggtgagtctagtacgcgactgctcgtgtcgagcaaacgcgtggacgctacctatttcttccgtgcgtatctgaacctgctcacaaaactctactccagcccacaacatagtccacgtatatgcaaaattttcatgggcccactagcatatcccagccttttcctttctcatttagactaaaatccaacataaacaattctatttcatacatgtaactttatctgtataaactttacatatactagctttatgcatagtagttttatgtcttgttatatataaactttgcatatgcaaactttcaacatagattttttttcaaaaaagtatgagtgaattttaaacaataaaaaaaataagtccagcgaaaaaatatttaataaaacttctattgtacttaaatgggccaaagtagaataataatctttctacctataactttattaataaataatatactttccacatgataagtttatataagatataaaattctttctctaaataatagaaaaaaaattcaaacataatttttgctgatatgtttgaaaaatgagtacatattttgtgatcacaaaataaataacaaactagaagaaaaaataatttcacaaaagaaacaaaaaattaaaaataagataaagatctcaacttaaactatggcccacaaggcccatgtcgtatatctccagaatctaatcagttggtgatttgaaattaccacgacctggctagggttagtacacatatgtgatccggaaaagcggcattcgcgtgaacttgttccgggaacgttcacgcaatagctttttcgctcagattgtatatcggtctaagtacgagatgctacctctgagttttttatatttctttaaacaattatagaaacatatacatttgttttaaaatttatagaggtttattccgctctctagtacatagtgactacaacgctggaaggtggagggcccggcaggtatgagtttaggggaaccggatcctctgactttgcttgcaaagtcacggacgtgcagtcggggtccaaatcatagtagaaaaaaccggaccggaccggcggttcaacaggaaaaaaccggaaccagctccctgaccggctcggttccctcaaaggatcgttcacgcaatcgacccggtgtgaaccggctgaaccgggtggttttcgcgcgaaaccgctgaaccgggtgaccctaaaccggctggcttgtatatttcttatgagccttgtaagactggaggcccaacttgatttttatgcgagaaaaaatatggtgcaaaggtgggattctaccccaggctgttaggatagatgcaaaccttgccaaccactaggctaagttagctgttttgactagaagacaacacagaatatacttagccaataaaccgtggttcaaccagtgacccaccggttgaaccgatagaccggtgaaccaaacactccaccggatcaatgaccggtccggttttttctactatggtccaaatccaccgtctgttgcatctgacggtcctggcttgcatagcgagtcgcagcacgcatggccgtgcggactaccagtcacgaagcggcctagcggatgaactagctcgatcaacacaacacgtgaactagcagagggaaaataacaaaatcttcacaaattttgcgacataacagaacacaactgttctatcgtatccttgcttgttcgttccaaaagaaattgaagcatacgcgatcaggcaaaaaaaaaaaaagcaatcaattgtaatggagattcaatttctatcaccgatcaaataccgaaagaacttccaagctgcttaaccaagagaccacggtcaattggaagacgaggctggaattgatatgcctcatgccatacatgtacgcgcgcgtgtgtggatgtgtagaaggagaaggtgaaggtgaaggtgaaggtggaggcgacagaaaagggaacgagcacgatacgccagcatcggaggaaagagccgccacggcgccagcggcgctgcccttgccggaggactggaggaatagatcatcgtgcatttgtgctattgggccgaattaggtcgcagcccgcatggtagtgcatggcagaaccgttggatgcaacgaacggtggatttaaacccaactgcacgcttgtgactttgcaagcaaagtcagaggatccggttccgagtttggggctagcatgtcttatctctataaggtcttgtttggtttggagtctggagggaattgaataggatttgagggattgagagagaataattccataccacaataggtgtggaataaatcccttccaacccctccctcatggggattaaacgaacaaggcctaacggaagagagggagcggtgggtcatctcacaaacctatcacttatatatagattaaataagtgggtaacacatcaaattatccatttatttaacttactagaataatgcccgtgcgttacaacggaatctaaataacattcatcgacaaaaattaaaattttgaaccacatatcacaactggactgaaagaaatatgcttaaattaaaatcctaaatcatatatcacaactcgactgaaggaaatataataataaaaataacaacatgaaactataaataactttggcccaaacgataattcaaatttgtcgacgtttgatgtctcgactacggtatttgcatggtatggggatcattggtactaggatatacgcgagaccgaggtaaaagagatgaagacagggatttttatacaggttcgggcccctgaattgtcaggtaataaccctacatcctgttggccgaagccggtattgctcttattcatgataatcacaccagtataatatttggggtagcctatctaactgttgtcgacatggcggtatgatgatataactcgtagtcgacaacagggtagccttcctcctcaaatccgtgcctggcgagatcagagatagtgctttcgtctctcctgacagtatctagagacaccgtaggggactagccatgcctatccctgaagtcgatatccggcgacgtgtcttggcgtatgtaggcttctatgtctattgtgttgggtgttgattgcctcgtccccactctcctcctaagggggcttgtatttatacccataggtgtccccttgtccaagttgaactagggaaaccaatatggatataatccgagtagtccttgtcgtttccatgtagaactctgattatctttccttatccggaactcctcctatatccacaggttgtttccatataggacatggtatgtggtgggtccttccgagatttagtcaactactattaggtaggtggtatccataaccctgacaaaattatttaataattttaatacaataatttttaatcgatcaaatagtgctaaaattaatattgtaaatggaaaaacaactaaaattagctagaaattaaaaaaaaacttattttagcccataaatacaaatcctatccatcatttctgaataggtaaccattttattgacataaattagaattttcctgttatattcatattctattgtctcaatattatatgagtggttcaggagcatagttaggctagaccaagaatgaatagtgtcttcgtccatagatggtggaggttggtaatgaagaaagtcataatagcatgaatgtggctggcaataatgtagtaccgacagagagagaaacagcaacgacaagatctagaggtgaacacgactggataagtgcggcattttaataaaaaacatatcgcttaaccgtttgggaatcatgcgcgtagagaagcgagcaagttttccactcttatcacatctcctaacgaacgcaccagaaaacagagcacgtcacagctgttgggtgacgacagtagaccagtggtggcatccaagggcgctcgaaatcttctaggactttttcctcaagatgtgcttaagagcaagtttaataatacagtgaactcccagctccaaaaattaaaatatcagttataacgacctaatagtatattcatgcataattagttatacatctatactgcatcattaatacttaatccacctatctctcacatactcagtttattggagctcgtgttatagctagttacaatttatagcccgctttttttctctaaatccctccctctctacatcatgtaaacacaaatatgatgccacaactagcttgtacaaaccatttacatcaccttatacttgctctaggaaaaatgagtgcatcggttgtttgtcgatgccatccagtactttgcacatcaagctatgcaccacctgcatgactaagacaataagggattgttcagattgatgccattttaaactatatttcttttaagttgtcaaagatatgcatacatttattttttttactaaactttgataaatatataaagaatcctgctaaaacttagcaatattactaatttagtaaggtttattttgactatagtctgtatagtccataagggagtaggtggctctaggtggagagtgatacaaacgccaacggtgaaggaaaggtcaattaatgcttatcgaagcctaattaagcgtcacggcagagcggtcaatgcttatggaatcctggatggcgtgcgtggtaatttttatacatatatgagtatatatacctggagcttcgtagaacttttctcttcggcaagaagtggtgataacctcgtataaaaaataaatgggtcaaacaaatgatttatgtgtatagaaatgggaaggataagattaattacagggtcaaatggattgttacatcaacggctacctttacttaatctattttagtttttcctaatcttcaagatgtggggcctattcactttgatgtcatcgtcttcaaccataccattttttttataaagttaccaatattttggctaagcttagtttgttgtcaaattttagtaaatcaaaatttggttttggcaaccttaccaaaatttggcaatgtcaaaacttgataaggttaaaaatggtagcaaagtgaacaagcccgtgacttccactagtatttttacaaatctcactactacaaaaacaaccattagtgtcggccacaaaggtaccggttagctaaaaaagacacctataagacacttcccgccaatatagtgaaaaactggcacctataacggttaattggtgtcggtttttgttgggagggacattggtggcacaaaaaatcctcccaccaactatcctaaaatacaacaggtggcggccgtgcgaaaaaaccggcacatatatcaatggtgccggttatttaaccaaactgacacctatagtttgcatcatataggccagcgaggagaatagacgccggttcggctaaaaaatcggcacctgtaatattataggtgttggttacaataatataggtgtcggttctgggtgtacaaccggcacctatagtgccatataggtgttggtttttggtgtagaaccggcacccataatattataggtgctgattttaaatttgaatttgaattatatcctattcaaatttgaatttaaaatttaaatattttttatatatagtatttctgtgcatctaaagtttatacacctaaagtttttagacccaaactttataagtcaaaagtttacatacccgattcaaatttgaatttgaattcaaatattagtttatagatctaaagtttataagtcaaaagtttacatacccgtttcaaatttaaatttgaattcaaatattagtttatagaccgaaaatttataagtctaaagcagggccggtcctgactttttagggccccggtgcgaaactaaatatagaggcccttatcatataattagtatatacatatactttatatataaattattgtataaatattaaaattttattaaaaaatatttatatagaaaacattatagtacatgttacctcaaatatttcttcaaacatttgtgccttcgtcggtttgtccaattatcggaacaattaaattaacctaacataggaccatacatcaatacacagcaaaaaccaacacatgagattacatgttaacaaataaaatcacaatgttacaaaaatttcaatttttcacttggcgatggcgatgtattggtgttacactcaccttaatagaatgattgttgattgatcactgatcagacaaatacagtattcagattcactaacccccgtcggcggtcggcccatccttctcgagtcctcgtcaagacatccagtgctctaggggctagggcagccggcggcaagcatcaagccatcaagcaagcaagcagcggctgccgccgtgcccgtgcagcgcctggccggtagccacctacacctgacacaaggcctgactcctgagcacctcgtgtcctcgtcgatcgtcggcagtcggctcgtcctcgactcctcgtgcggattgcggaacgagcggtgcacggtgggcgtgaggagaagagaggagacgacgtggaaggcaggcggcgccaatctcgcgagtcgcgtattcggcgtctgttcgccttcgccctaacgccacatcgtcgcgccgcgcgcgccggaggggggggggtggggttggcgcggggccctgcgatttgggggccagagcgaccgcaccgctcgcctccctaggaccggctctggtcaaaagtttatatacacgttttaaatttaaatttgaattcaaatattttttatatatagtatttttatacataatttttttcaactttttttaaatttttttatagtttactgtagtaggaagagaatgagggaaggaggaagggggagatccgtacgtatagggggtaggggcgtgcgggtgatcgcgtatagggggtaggggcgtgcgggtgatcgctcccgcattagccacaccctatgcgggcgagaccgcgggagttgagacccatcatcacgttcttaaaaaaaaaatcacacacacacatagagagagacccatattttatcacccatcctagctagctagctagctaacgatttgttttggttcagaattgctcgaacttttactagggacgtacccaagtgttgtaatgggattaaagaaaagaaaaatgggccaataattttacaagttcaggatcacttttgaacgcatgattatcaaatcatgggaataggaaaaatataaaaatagaatatcatatttattggattcctaggggatttgaaaacacaggaacactttaaaactaatgtttgatagtcacacagaaaaaatagaattcaagacattgaaagaagaaaacataatgtaagacctcatgctaattctctttcgaaattcctatacaataatcattccgtaggaatttctcgaaattactatgttatagccttttctgtacattcaatgtactctacggatagaggaatacataaagttgaacataataaaataagaaattgaaagattcgttgaaattgttcgtttggaaatttcccgaaaagctaatttcgaagtaatcgatagaaatcaatcatttcttttagaggtcttgtactattatctcccatagatataccttagatttctatggaacataatggttttacggtttcagttatctttggacttattgacttgttgttagagaaatttatcggtaacgttccctgtgtatcaatttttttttaaaaaaataaaacgagtgaaatggggaacaacatttcgcaattgactcttctacactcaacccaacttgcagcctcagttgattaattaacacctcagcctaaccaaacccatttgaatctccttccctaatcgagcagctgcaatgatgacggcatctgaggtttggcaacccgagaacggaagctgctggcacatgttcagaaacgcttggagacaaagatcgctcttccttaaaaattgccaaagaaaacagaaatgaatcataggaaagaaacatcgcgataaaataaacatatggaacggccggccaacaaaggtgagaaaaaatagaagattaattgctgtaattaattaagcaactaggcactgagggtccaactggtggggacaccagccagaccagtcgcactcgcaggtgacctcagatcggcgaccggaggaggagaaaatcaaagcaattatacattcaaggcctacggctcaagacgagatggacaagccgcccagtgcctccatctgcccgctacttccctccctgttgtgcgggtaacatcctgaaaattagaatagaacctaggctgtgtttaggctgtgtttagttggattcaaagtttagattttagttgaaattgaagatgatgtgactgaaaaattatgtgtgtatgacaggttgatgtgatgaaaaatgactgaagtttggatcctaactttaaatctaaagacagccctagagaactgaaaattacagagccattaatttttttttcaagatgggtcttctgacaccagtacaatccatctatctatctactccccccgtccaaaacaaagacaaaccctggtttccatgtccaacgtttgatcgttcgttttatttgaaaaaaatatgaaaaaaattaaaaagacaagtcacgtataaaatattaatcatgttttatcatctaacaacaacgaaaatacgaattataaaaaaatttcatataagacggacagtcaaagttggacacggaaatccagggtttgcctttttttaggacggagggagtatctatctatctatcatacctctatacctatatactaattggacactttctaggagctctcacgttaataaaaaaaatctagccatctattatattatattatattatattatattatattatattatattatattatattatatactaaaagtccattaaacttcctataaacactctcatgccgccacgtgggactcctacaaatgctcctaggccgccacgtgactctgttaaatctaaccgtcgattttcacttaaattgatggacctgatattttagacttaaatttttccgtgaacctccccttccatcgatccccggtttccctcctttttctgatcctatttttatgctattgtttcacccaaaaaaaagacatgcgagtacatacgtgagtatagcacgatcagataaaccggaaagaacatactcctgtacgtacgtaatacatgatcagagaaacaccggaagaacacatatatatacttacacgtagtaacatatagaaatagatgaaacataatactctataaatttacataaatatcaccatcaattttcatttaaattggtggactcaattgatgttttacaacattaggttagatgtcttaaagcccattaaacttccaaaaatgctcctaattcgccaaacgcttctaagttgtcatctgatgctctaataaattagtgaaattcttaaaattctaaaataacaaaacatattttcattaaatttggtgaacccattatttacaagcattagattaattttcaagaaaaaattcctttcctaaactcgggcctaccaaagagctttgtatgtataagttaatttttttttacaaaaacgaatatacgtatgtacgcctcctcttacttcaattcatttatccacccacctattccttctcctatgttcatgccttattagttagataagcaataatatcgtgttaaacaattaagcttcttaatcatacaactaatttctgatcagcgtaaatctttagattatttataactcaatttacagttgaagaccatatttcactacaatttagctttgaaaaaaaatgtcattttggtttatatttctgtcttttgcgtgccattcaagcaattataaaaacatataaaataatgacaataatatagattttatcatcatgcataactttataataattaaattaggtctacaatcatgaaagtaaaatgaatatactatgagtaatgtttacaaaatatgttagttagaaagcaaaacttatgcaacaaaataagcaactataacatctgactcacactactaatattatttgatgaacttacgtctttagattattttacatttgaagatccatatccactgtaatatcgattttgagaagaaatatgtcagtttagggctatattttctgacttttgtgtgccattcgaacaattataaaataatagaaagataatgatatatattttatcaccatatatgacttcggaataattaaattagatctatatggataacagtaaaatgaacgaatgctttaaaaaactactcccccattataacattagaataagtcaaaatagtattattagattattagattgtagtgttcgcatttttaatatctactatgaatatactggaaaagagaagtaaaaactatagattttaatcgatcaataaatcatttttttttaattttcagttaaaaaagtaataaaaactaaaacactacaactcgggaattattacaattatatgcatgcataatctcctctcttcaactctctcttcctctcctcactcatttaattcctttgtctcctaatttttaactaagtaaaaacagatcaataattagaaagccaaatgattataattctaaagttgaatcataattttaacttatttgaatttttattttatttataattaaatagataatttaatatccatgttacccatatttcactctatagacaccgttcctttgcatggtaaccaaatagaaaaaatacaaaccataatacaaaatgaaaatgagtactatattatcgtaaatcattgtacatcctctgaacgcacttaaggcgtcacatgttacgccttaaataaaaataaaactttacaaattggaagaaaaatcatctgaccatcagtttccacttaaataggtagatctattattttcaaccaatagatatacatttaagaatgtcttaagccgcaatatgttatgtcttaaaaattggaataaaaaaaatgtgataaaaaatatatcaacggtttcacttaaatcatttagataaaatagaaaaatccacgcctccacttcgccctcccccagaacatacgcacaacacgacactactcgtcacatcccttctccactctatcccttcctgtttatacagccaaaaataatcaaaatattaaaaaaatgcataaatttcaagctcatctgatttctaatctaaatattattgtatttataattagaataatgatttaaagatccataaagcctatattttgaactgtataaaatataaaataaagcaggtaatagaaaatatcaatagggactaaattaaactattttgagaaaacgtgatacgttcataaaaaaattggttcttacatttcactaaaattggaccaaccattgcatgttccattttcgtaacaattttaaaatgcttagacattaatggccttacatctatcctatattattgcattatgagtttctccacatatttttacatatataaaccgcactaaggttcgcagtatatagttctttgaaaagttatatttgttactactaaatttaaaattttggattcatgttaactaggtatattcttttgaaaaagatagtataggtcacaacgaagcgaggtatatgacatgtctctattaatttatatataagtatgtaacaactcgcatcaacttaaacctactaaaaggagaactacttgatggtacaaataaaacatatttattaaaaatatagttctttagaatttgttaaaaaaagaacaaaacaccttacttctaatttacagttgatttgttagacacgttttccaaacaaactaaatcgaacttccttatatataataaagagattgtagataattatttatatagatgtatcaaatttgatatattttagaacctaacaaatatcttggaaaaattatcaaagcaaaatattgaagaacagcggaggcctcacctgatgtgtcttattcaaataaaaaaataaaaaagtacttttaaacatgggaggtgtcaaccaattgatattctgtttatatatatatatatatatatatatatatatatatatatatatatatatatatatatatatatatatatttcaaacgcaatgtacaaatcaaggttggaaatttcagaaatttcgatcatttcggacccctcagatatgatattattttggccgaatttttttaacttttcatgaattttggtaatatttgttcaaattcaactaaactatgttttcaaaatttcagaaatttcggtatttcggtgatgcactgatgcccaatcaaatcggctaaaccgaaaagtttaaccctgtgtacaatacatccccgcgcgaatgcgcgggctaccttcctagttaatttaacatgtcatacaatcagcaccactgatctaaaatcgacggtgcacgcatgcaacagggagattcaacgctgctccatgggacttcacggctggcatcctcgtcttgcccaggtttgcggtagcagcggaacaatggctgccctcatttgatagctttgagagtttgttcatgacgtgtgatggaagatcgatctacaaagagcaaagcaaagcaagggagtaaatagaagaaattagatgttgacatatacagttaattgtgcgccccgggcgactcggtggccaaatatatgcagcgggacctgcatatcacatatgcatctgcagcaggcaacaaacatgaagaggagttgagcagagcagttcaattaatttgaatcgagggtatcaagttgttagagagaaatcaatttcatcgtggatgggtgcagtcaaatgcgatgaaatcttcatgcattaggaattgttatgaacaacacttgtattcacctcagggcaaaacgcctaaatatatacaggtacaagaatacacaaatatgcagaaaaaccctttacaaataaaggaatataaaatctaaatatacatctaacacaccccctctcaaacttatggtgaatcaacaacactgagtttggagagatagaacgtgtgttgagctctagtttgtgccttggtaaagaaatcagctatctgcaactcggaaggcacatactgaagagcaatcacctgatcatgtacctaggtgcgtgtgtaagaagcatccacaccaatatgcttattaagctcatgcttgataggatcatgagcaatactaattagcacctgtactgtccgacaacaaagaggtcgaggaagtcacagaaacaccaagatcctcaagtaaccaatgtaaccaagtaacatctgctgggctatagctcgtaactcagcctctgcactagaatgagaaactgttgtttgtttcttagtcttccaagcaatgagggaaccaccaagaaaaacacaataagcagaaagagatttgcgattaaaggaatcactagcccatgcagcatcataatacacttgaagttgtaaagatgtggaccgagtaaagaaaagacaacgagagatagtcccacgaagataacgaagaacacgaagaagatgactatagtgaagttgggtgggagcataaacaaactgactcagaatatgcacagcataggaaatatcaggacgagtgacagcaagataaacaagactccctacgaaatggcgatagcgagtgggatcagctaatggcacaccagtagtggcagaaagatgaagattaagttccataggagtgtcaaccgtgcgttggtcagtaagagaagccctatccagaagatcctgaatatacttcgcttaggaaagataaaaacccttaggggtagaggaaacctcaatccctagaaaatagcgaagagaaccaagatcatacatcagaaaattgagcattgagacgtgccttaaccaaagcaataaaatcagcattatcgccagtgataatcatatcatcaacatagagaaaaagaatggtacgaccacgaggcgaagtatggacaaaaagtgcaggatcataagcactggccgagaaaccagctgcactgactacagaaggaaaccgttgaaaccaagcacgaggagcttgcttgagcccataaagagagcggcgaagacgacaaaccatacccttaggaaccgaatatcctaggggtggtcgcatgtaaacctcctcatgcaattcctcattgagaaaagcatttttaatatcaagctaggagatattccaatgacgagcagaggctactgcaagaagagttcgaacaatggtcatgtgagccacaggagcaaaagtctcatgatgaccatgctcttgttgaaaaccacgcgctacaagatgaactttatagcgttcaagagttccatcagagcgagtcttgaccttatagatccatttacaagtgataggacgaacatgagatggcaatggtacaagatcccaagtaccagtacgctcaagtgcagcaagctcttctgccatcacatgttgccattcttgatgaatatcaacatcttgatgagaactaggttcagcgagaatagtagcaacataagcatagcgaccatagcgatcctctggacaaatcgtaactaaattacgatcccgaagattgtatctcggaggagcaataggagaagcatcaacataaggctccataacacgagggcgacgactatagacttgagtaagaggaggcacataggaagatgcaagagtctcattagaagggtccactggaagaggctccactggagaggaagatactgaaagagggatgctagtacaaataggggcatcaggacaagtgaggaatgagagagaggtctcatgagaagatgtggaactaggacgcgaaaagaaaggacaagactcatcaaacgtaacatcccgagaaatcaacatccgacgccctacaggatcccaataatgataacccgtatgttccgcactttagccaagaaacacacactcaacagactgagcagtcaatttcgtatgctcacggggtgcaagaagcacatagcaagaactccgaaacatacgcaaattagagtagtcaggaggttgaccacaaagatgctcaagaggaagcctaccctaaagagcagaagaaggttggatgttgtcaagtatgtagctgtggaaacagcctcagcccaaaaatgaggaggaacagaagaagcaatcataagagctcgagcagtctcaaggagatgacgatgcttacgttccaccacaccatactgtgcatgagcaccagggcaagagagctgtggaagtgtaccctactcagaaagaaaactacgcagctcacgagaaaggtgctcaccagccgaatcagcacgaaacgttaggatgggtgtatcaaaatgagtatgaaccatgcgagcaaatgatttgtaaatagccaaaacctcggtgcgatgagacatgaaataaatccaagtatgatgagaaaaatcatctataaaaatgatatagtagcgattaccccctttcgaaacaaaaggggcaggtccccaaacatcagaatgaacaagatcaaaaggacgcttagatacagactcactagtaggatagggaagttggatctgttttccatgtttacaaccttgacattgatttaaggacacatcacccgacacagaccctaagagacctcgacgaactaaagacaatagacgagagccacaaagatggcccaaactatgatgacactgagtgaaggtccctgtagaggaggcagcagaagcaagaagactggaaagcgcagcggaaggaagacgaagccagtcaagctcccaaagacgctgagaatcatggtggcgagggccagtaccaactaggagacccgtgtgtcgatcctgaacacaacaagagtcagaatcaaaaataacacgacaaccatgatcagcaagctgtccagcagacatgagctgtatggtcaaatttggaacataggaaacagaacgaccactaaaagaagaaaatgaaagagttccacgaccaacaacagaaagaggggtaccatcggcaatttgaacagtaataaggactaaaggatgatatatagatgaaagacaagacttatcaggggtcatatggaaagaaacacaagaatcaagaatccacggaaaagtaccagaagcagatgaggatccctcattggaagtctgagaaccaggaacaatagaaccagtttgtgtagagggcaaagcaactgaaccagctgaacgtgtcgaagcagaagcagtgaggcgacgcaataatataaggatctcctgtgtattagaattgctagtactcttcttcttagaagagaaccacaagtatgcaatggccagcaatcttagaagccaattcctcggtaattttattttttttaaaaaaacttaatgtagataacatatctcaggttttgctcttactataattttcaactacgatgtcatcatcttccatgaatattacgttactgataaaattattatattgactatgtatatattaaggtctgagtacgtgttgatagtatgaataacagtaacccatgttaatagtatgaataacagtaacccatgcaacacatgttgatagtatgaataacaataaccgacgcatggagtgatgaggccgtagacatggattgcaatttcggatgaaaaatttcggttttgctagtggggtccggcaaaagtcaatgccggtcaaaaatttggacaaaaaatttttaaaaaaatttgctaataaggccctcactacccccacaaccctaaccctaacccattttttccccgacagcgccgctgagagacgaaaaccttaacctccggcgccaaatcctcctacgtgacgctgccacctccacacctcaatcacggtggcgctcgtcctacaggtggccgcggtggctcagctgctccctcgtagagtccacgtcatcagcgcattagccatccctgcccctcgggctcctggcggcggtgctcctcctgtagagggtggcattcagttgctcctggatccggtaacttggcgagagggttgtcgacgacgaggaggcagcggtatgtatcttggaatttcttgcctctccatccccattcttactgattcggtgtctcaactctcaattttcgacttcgccactgtctgattagttactctgctcttgtcctgttcttgaagtagtgtgcactgtgggcatgggagaagaaggtcctgcatatgctggcagtaggagatgcaggggtcatggttgccctggtccatcagccgccgccgcagctattagtgttggaatataaagtgaattgcctacctttcctcatcagcttaagcttttgggttaaactagtcagtgcatgcaacccacttctattccacgctagaggcttgagggggcctcgcgtgagggggagtgttggaatataaagtgaattgcccgcattttcctcatcagcttaagcttttgggttgaactggtcagtgcatgcaactcaataattggagctgatttcagcaggggaatgggaaggggagcagcagcagttgttggaagacgagcggaagatggaaggggaaggggatcagcagcagcagctgttggaagtggaacggagggcggcaatcctgagactggtattgggcgagggagaaacatagccccaccaggaggtaaatactttagtcattggacaattaatgagtatttggcaattattgattgatcgaatgttcaattatccttctgttgattgcaaaatgatttgtccccgaattttcggaattttcggctatatttcggatttttcggacaaaattttcaaatttaattcaaaaaatttcggatgaaaatttttgaaatttctgaaattttgtcgattgcagttatttcgcctcccctggcaaaatacacactttcgaaactgcaaaccctggccgtagatgcattgtcagcgcccacgtacatatccaccatcttcaccaatattcatcatgcatgcaaaacgtgaagcgaatatgaagagacaaccacaagcagcttaatcggaggtgttctgttgacctaggcctgcggaggtaattaactgggagactttcgagacctcagaaaccagaggaccacttcttcaagttcagatctatccaacgacaagctatagagtgcacatacatacatacatacatacatattaccttgggaatttgtatttatgaaccttgagattaatgaagcacatgttccctatgttttttgtttattttatgtacttagttatactggcaccccacacatatcgttgttatttttctgtgctaaacatttgtatattgtgtcattttagggtatgacttatgcaagcgtaagtgactaaacaaacacgaaaatcaggtaaaatagcaacacacaaaaaggagcctagctgaccattttccaccacacacaaaagcccagtcaccatgacatatatatccgaccggggcccttgtctagctttcttctgcgttaggttgttcctctttggcctcttccataggagatgttgcggaattcatcttggccctcttcatgatcagtgtttccactaaactttccaagcgttcatcagcatgtctcttccggttgtagcgcagcatgatgctatcacgatcgactggttcctcgtcgatctcgtcgagcagtggaccgatttcaccgttcctcggcatgagtttatcggccacgtctgccggagtggtgttggtctcgctcagcagtccctcaatttcactgaatagtgagtgctcggtgatgtttaggtagttcttggcgagcatcttgaaggcctcgaaccggcagtaggacatctcgatgtccatatccatccttccacgccgggtcagcgccgggtcgaggtggtcaacgtggttcgttgtaaacacgaagattcgttcactgccgcacgccgaccacagcccgtcgatgaagttgagcagccctgacagtgtcactttacttttgtcgtgattcttgtcggacagccctatcaccacatgtttgtcgtcgccgttggctgccttcttgcccttgcggttggttgtgagctcgacctcaatcgcatcgatgtcctcgataacgatgatggatttgtcggtcgtatcaaggaagagcttccgcaagtcggcattgtttaggacggatattaagtcgaggtcgtagacgtcgtagtcgaggaagttggccatagccccgatcatggtggtcttgcccgtgcccggtggcccgtgtagaaggtatccccgcttccacgccttgccgaccttggagtggtactccttccccttctggaatgctctgagatcgtccatgatctcaaccttcttggcaggttccatggcgagcaagtcgaatgtcgacgggggattgtacgggacattgctccacatgctcttcccgtctttgacgtggttggtgaacaatagcctctgtcggttcttagcgattagctcacgccactgccggacgacgcctggaaggtaggagttcagcacgagctgccggtggcgcttgtgaaacaccagcctcaagctccgcggctcgtccgagtccccaggcaagaagctgatgatggtgccccccctcttcttggaggtcttggggaacagcctccaccacatgcgggcgccctcgaagctgtcggcgacctcctggttctcctccagactaataagtgggtcgtcattgctgttgttgcggagctgggccctgagcttgcttgcaccatccaagcacacgcttctcaggtaggcagagatggcgtcgaacagcatgttccgttgcaatgtactcggacacagtgatctgctcgtaggggttgaagtaggacatcgccatgggaaccaagctactgatgatgtacctagcctcctcatggacgtgctccggcattcgggaccaaagcaagccgacgccagccatagctgacccgaaccctacccacttctccacagaaaacgccatgactgcgcggtgcagccactacgtactcgcctagtcgcctaattaagcgtatctagctacttacactgtagctcccttcaatggttgccgttgtggatgggcttgcttaccgttgcttctgtggcggtgtggcctcggcttatataattggcgattgtggcgcgcaaatgatccctgccgtttcatcgtggaacaggaaaaaggtgacaacgcgcctcgtcgaagtttcgtcgaaccaagcgcgatgatgcgatttggcttactccacaggaaaagtaagtagtagtagaaattgcaaggggctcaaagaaaccacgagaagggactatatcaccgcgttgggtttaactattaatgacccgagctgaaccggtgggctagaccacggcaccacccaccaaccactggtggagaaaccatctttcgtcggtcggccgatttccacaatagtcccggatgcaataaaaaccggggctaaagatgatttttagtcccggttcaaaagggtaacgggcatatttgatctttagtcccggtttgtgttaccaaccgtaatcccggttcgaatgctgtcaggtcatgtcaggcccccccgggatctttagtcccggttggtaccaaccgggactaaagatcccggtgatctttagccccggttggtgctaccaaccgggactaaagtcccacccctatatatatgtcttcttcctcctccagctgcccgagcaagcttcaaaatttcttcaaaaaagaggggaggttatgccaaaatttctattgaatttattttggtgattacatacaaatcggaggtgcctaaaaggtttgcaacttcatcctccaatgtttttttttgtcatactacatttgcacctatgttttgcacactttttttgtctccaaaatttagttgtaagttgatgagagagaaaatgtgtgtggggaagaaagaatatatagaaatttagttcatttgctaaacaaggttttataaaatagttgagaaggaaaactctagtgaaagttaatcttaaataatagaaaacaaactaaaatgaaaattaaaagaagtgaaacacattaaaattagtttaaaactttacaaatagtttttaagaattatttggtgtaatattttatgatttttgtatgaataaagatatcttataattattgtatgactgtcattattgtaagaataattatttgtgtacggtttttttgactcatgtagatggatcggcaatggatgtacgctgaccggcggtccaaagagtttattgacggcgtgcactattttttgagagtggccgaagctaacaggcaaaggggttttatttgttgtccatgcaataagtgtaagaatcagaaggagtattctgcatccaggactattcatttccacttgtttgagtcggggttcatgccaagctataattgttggacatcccacggagagcaaggtgttgaaatggaagaagatgaagtggaagacgacaatattccggactttgctcagtatgttggatttgaaggaaatcaaacgggcgaggaggaaatagctactgatggtaacgacgttgcggatgatcttggtcagatgttgcaggacgccagggaggactgcgaaagtgaaaaaggaggcccataaattggacaagatgttggaggaccacagaacttcgttgtacccaggttgcgagcaggggcacaaaaagttggataccactctggagttgttgcaatggaaggcaaaaaatggggttagtgacaaggcatttggcgatttattgaaactcgtcaagaacattcttctggggggaaacaaattgcccgagacaacgtacgaggctaagaagatagtctgcccgttaggactggaagttcataagattcacgcatgtccgaacgattgtatcctatatcgcggtgaggagtatgagaacctagaagcatgccctgtttgcaaagcactacgatacaagattagacgggacgatccaggagaagttgacgggcagctaacaaagaagagaattcctgctaaggtgatgtggtatttccctataataccatggctaaggcgtttgttcaggaacaaggggaatgctagaatgttgcgatggcacgctgaagagcgtcaacaggacgggatgctgagacaccccgccgatggttcgcagtggcgaaacatcgacagaaaatttaaagaatttggaaaggacgcacgaaacatacggtttggtttgagtacggatggcatgaatccttttggagagatgagtagcggccatagcacttggcccgttacgatgtgtatctacaacctcccccctggctatgcatgaagaggaagtacataatgatgccgattattattcaaggccccaagcaacctggtaacgacatcgacgtgtacctaagaccactggtcgaagatcttaaacagttgtggaagaaggaaggtgtccccgtgtgggacgaggacaaacaggaggagtttaacctacgagcgctgctgttcgtaaccatcaacgattggcctgcacttagcaacctatccggacagtccaacaaggggtacaaggcttgcactcactgtatggatgaaacagaaagtacgtatcttaagcactgtaggaaggttgtatacatgggtcatcgtcgattccttgcagcaaaccacccggtacggaagaaaggcaagcacttcgaacataaggccgaccaccgtacgaagcctaaacatcgcagcgggaaaacagtgtttgctatggttaaagatcttaaagtagtgttcggaaaagggcctggaagccagcatatagagagcgaagatggtcacgcggcgatgtggaaaaagaactctatattttgggagttaccatattgggaattcttggacgtacgccacgcaatcgacgtaatgcacctcactaagaacctttgcgtaaaccttcttggcttcctaggtgtatacggaaagtcgaaagatacactggaagcacgtaatgatctgaagcatatggaacaacgcggcgaccttcacccggaaccaaaggagaaaggaagccattacttgagtccagccagctacactcttagcaaggcagagaaggaaagtatgtttgaatgcttggagagcataaaggtaccgtctggatactccacgaatatccgtctggatactccacgaatatcaagcgaataataagcacgaaggagaagaagttcacaaacctaaagtctcatgactgtcacgtgttgatgacacatctgctaccagttgtaataaggggtatccttccagacaatgtccgggcaacaataacaaagctatgtgcattcatgaacgcaatttcgcagaaggtcatcgatccggatagattagaagcccttcagaatgaagtggtgcaatgtctcgtcagttttgagttggtatttccaccttcattttcaatataatgacgcatctgctttgtcaccttgtgaaagagatccgtattctcgggcctatgtacctacacaacatgtttcctttcgagaggtacatgggcgttctgaagaagtatgttcgtaaccgtgctcgtccagaggcaagcatcgccaagggttatggaacagaggaggtcatcgaattttgcgtagaatttatcgaagaccttcgcccaatcggggtacctgaatcacgccatgaagggagactacggggaaagggaactctcggaaggaaagcaataatgacggtagacaacaatttattccgtaaagcccatttcactgttctgcaacactcttcattggtagctccttacatcgaggagcacttggctctagttcgcgccaggaacatcggtaagtccgatacatggattacacggcatcacattgatactttccccgcgtggctacgacaacatctcatgggtaacgagtcgatcaaccaacaacttgccttcctggcgaggggaccgtctgggtcgatcgcgacattccagggatatgagatcaatgggtacacattctacacgagagcccaagacatgaagacacgaaccaaaacagcgctgttcgtgtcgatgccatgggacacgatggaacaactgccacatattacggtgccatcgaggacatatgggaacttgactatggtcctctcaaggttcctctgttccggtgccaatgggttaggttgactggtggaggcgtaatgattgatgacagtgggatgacaactattgaccttaacaaggttggatactcggacgaaccttttgtccttgccaatgatgtaacgcaagtctttttcgtgaaggacatgtctagcaaaggaaagaagggcagagggcctgatgagcctaagcgtcaagtggttctcgcaggcaaaagaaaaatcgtcggagttgaggacaagactgacgaggattacgatcagttggatgggcaaccccctttcacggtgacgattgaccctagcatcctcctatcaaatgaagacaccccttactcacgcagcgatcacaaggagggaacaatagtgaggagaaagtacgtgcggtcaaccgtcaccgccgatgtaatgccgtaattattgtgtacacgatgtaaactattttggatgtattgattatccatataaatcaattgatgtatggcatatgttaattacgcacgattattagaggtttcaacaagtttaaatcatgtatatgctagttatatgtgatacttacaatttttaaaagttttaaatcacacaggtggcaatttcatatgtatgttaattagagtttttaacatttaatttactagcattcatatgctaattataattgactagaggatttttaaaagttttaaatcacgcaagtggcaatttcatatgttaattagagtttttaacatttaatttactatcattcatatgctaattataattgactggagaatttttaaaagtattaaatttaatatatttttaaaactatcattcatatattagagtttttcacaatttaatttactatctttcatatgctacttatatatgactattcgaatttttaaaaggtttaaatcatgcatgtggcatttacatatgttaattagagtttttagcatttaatttaatataattcctacgctaagtatatatgatgattacaatttttattaattttaaatcatgcagtatgtacatacatatcttaattagagtttttaccaatataataatatcattcatatatatgctaagtatatatatatatatattgaaatttttattaattataagtcatatatttgcttattacgatttatccacttaatttattacagacaaaaataatttttcgaagtaattgtcattaatctttgtactttaaataatgttaatgcattaacttctattttataaacacatatgtaagcgaaaattatatgcagtgctataatctttagtcccggttcttaaccctaaccgggtttaaaaagaatttcgaaatagcgggaaaagatatttactcccggttgttgagaacaaccgggagtaaagatccgggggtatatatattcccggtgcgccctcgtcttcttcaccaacacttagacgttttcggccgatcgatctctctcagcctctctccttcgccgccactgcctagggcaaatccccgcgccgacgccgccgtatctcgccgtcgtctcgagctcgtcgtcctcgccgccgcctccgcctcctccgctgccgccgcatctctggggtgagagccgccgccgccagatctcccttcatctcgatctctccgatctcgatctctctccgtcgcgccgcccgccacgagacgccgcgccacgacgacgacgcgccatgccgacgccgcgccaagccgccgccggcacgccacgccgccgtcttcgccgccgcgcgcgcaatgccgccgccggcacgccacgccgccgccttcgccgccgcgcaacgccgccgccgcatgccaacgccacgccgccgccgccttcgccgccgcgcgcgcaatgccgccgccgccacgccacgccgccgccgccactgccccgcaacgccacgccgccgccgccgtcgccacgccgccgccgccgccgccacgccgccgcgccaaccgccgccccgatgccgccacaccgccgttaacgatcgaacgaacgagagcgagaacgagaacgatcgaacgaagacaagcgagaacgagggaacgaacgtgaatgagaacaagcgaacgaacgtgaacgagaacgagcgaacgaacgtgaacgagctagggaacgtgaacgagcgaacgaacgaggacgaacgttaacgtgaaatgcaatatatatatatatatatatatatatatatatatatatatatatatatatatatatatatatatgttacttcgcatttatcctaatacatctttttgtatcttgcaaaaaatacatgttgtcggagtcgtccgtcaagcctgagtggaagagctagccctagaaggaattggagcaggcaagtgacgtaataatataaatgattgttatatttgtaatgcaattaattaagattattagacctgtaattagacttatcatataagattgtgtagtgttctaatattatttgagttttaatataagattattttattgcaaattagacttagtatgacattattgactacggaattggtgcgactcctagcaattgactattgtagtcttaattagacttagcatatacgcacgaaacacttagcatacatggctattttagtcttagcatgtaatattatttgagttttaatataagattactttatttgtaattagacttagtatgtaattattgactacggaagtggtgcgacatattacacttagcatgtaatattatttgagttttaatataagattactttatttgtaattagacttagtatgtaattattgactacggaattggtgcgacaagtagcaattgactattgtagtcttaattagacttagcatatacgcacgaaacacttagcatatacatgactattttagtcttagcatgtcatattatttgagttttaatataagattattttatttgtaattagacttagtatataattatttactagctagggttgtataatatacgtcacctagacttagcttatatcacgatttgtaattagacttagcacgtaaggttgtgtagggttctaatgtacgacatttacacttagcatacatgacttagattgttaaaacataaatgtctcgtgacttagcagatgtttcttgtatcaacagatggctgaccgcgatgaggaacagatattgtacgatacaatcgcggagggaagcagccagtactggaatgaagaagaggggaacgaggatccaaaccagtacttgaacgaggaagggaacgtggagagggatgcggaggggaaccagcaggggcacgtggaaagggatatggaggggaaccaggaggaggaggctagtggtagtcaaccctccgttggacagaagagggcacgcgggcaacgaggtgcagcgaagaagcttgagggtcggcacatcataacggaagtggaagaagatggacgtcctagtgccccggccgaagccgccaagaactatgtacgtcacagcggttgggttgtgcgggataacgtgcctgtcagtacggtgtactggcgaagaacaagggcacgcggagatcatgagagctttgtcccagattcagagaaagagatgctgtggaccacaatgctcgagacattcacccttcctgcgggtacagaggacaaagtgaaaaggtggactctgaagaaaatggcagaacagtttcagagcttcaagggagatctgtaccagaagtatatactgaaggggcagacaccgaacttcgacacattcccaaagctaagggatcactgggacgagttcgttgcatataagacaggtgaacaagggcaggcgatgatggaaagaaacaaagaaaatgccgccaagaagaagtaccatcaccacttggggtcaggaggctatagcgtcgcgatgccgaactgggaggagatggaggcttgcttgattgagaggggtatcgaaccggcaacacccaattggccggaacgatcgaagttctggtactatgctcacggtggaacgctcaacccagctgatggctcactagtcttcggcgatcagatacgagaggctgcgcgacgactaacagatgcagtggaagcctcctctcagggcacgttccgaccagacagagatagggacgagctgacaaattaacggggtgattcgggacgaacacgagggaaagaggtgattccttagaagattggtttcaaggaggacatccacacgtacaggagtcggatgaggagcaagagagataccgaggcgaagattgcagacctagagttccgggtatcgagctacgaactcaacatgcaagaggaggtggcaaggaaggttgatgaacgcatggccgcacatcggccccatgatccccagccgaccattcctcctgcaatggtgagcccgtcaggaaaccgtagcagctgcgcctcaacggggcaggtaggatcacagagcatggacgccatgcaaacacaggacgaatcgacctgtcccgttgatgacatcactcagcggacaccatgtgagctgtatattcctttcaagaacttatcaataaaggtaagatttagccattccgctagttgctgcttatatatgttgattactaataaataatctctcacaacatgaaggtggcgtcgggcatggccatcccaacggacccttcaggtacttaccactacaggccgattccagcaggatactcgaaggtcgaagttgagttggtcgaaggcgcatacgaggacctcgagctggattaccctggaggagacggcgagacgcatctacgagacacaagccatgccattattctatggcgcaggcggtacatcatcctccctgggcgacaagcggcgtctcgtgcaccatctcctccggctccgccatctcctcctcaggatcctgcaccgtctcctcctcatgctccgccagcaccgtctccacctcaggctccagcaccgactcctcctcaggatcctgcaccgactcctcctcgggctcctacacctactcctccgcaagctcctcttccggcaccttcaaagtcaaggcccccccagctccatcgcctgcccacacaagggcaacgaagaaggcgaaagttgacgccgccaagaacaaggacccggggtacgattgcacgcaagaggagcttgacgcttacgttgcatcagaagtcaagagacaattcaagcctcgaagtccagaaaagaagattcctatagaccccagtgtcaggaacttcttcaggggtatgtctgcatctgtcaaggaggccatcaagctatcggactatgagcgaacgctgaagaaagcatcttctggaaagtccaaaccagtccctcagcttggagagcaaccaaaccaggagatcgagccattggtgaccggtaaagaaatgacgatagaacaatttattactgacaccggtctaactacggaccaattgctaggagtcgcaccaatcgaaaaggcggaagtgaaatacatgtacgaactcggtaaaccgcttgtcaagcctgagctgctgcagtccctacccacacaaatgtacaagttccatcagctgtacatggagatgagcgccaccggtagagagatgatcggagcgaggatcagggacacggacttcttgcaaggagatgacattctctggatcaatttcaggggaatctacgaactataccagctggacgccctcgacgtctctattatgagttgctggattttgtaagtatatcgttcagttagatttcttactatacgtctcctttaattaattaggtccttgtatataagtagactatataaaataaaatactcccttttatcgttgtagaatggagattcaaagggcccgacggcggagggttttcgatactggattcatcgaccctcggagagtaaacgtcgcaatgctcgaccaatatccacaagaaatagaggacaatctcgtccatctcctgaaggcgcagcattacaagacgttcatactgttgccgtacaacacagagttagttcaattttactgtcttcctacataccaaatttcattcccgtacgaacttgctaagtgtttcatatgtaatgcatcccacgcacattgcagattccactgggtgcttttactcttcgacctgtcggcctgcaccgtcaacgtatgtgactcaatggataaaaaagagtctacgtttgacaaggttttcgaacttatagacaggtaccgtcataagttcctctgttaattaagaaaatcttgttatgttaattgctactacgaatcatagctttaaactccatgtagggcttggtatcggttccgtcatttggtccgcggcaaatggagagaaagacttaggcggaagttcaaatttcctgtgagtacacatgctctacatttatatttctccgattcaaattaatacatacaactgtatattaattagatctcacgccgttaatttgtcatttatttgtagtgcgcaaagcaaaagcagggaactaacttgtgcggctactacgtgtgtgagtattgccactgccttgcagaccaaatcatcaccacaagagagctcgatgtacgtacaaataaattcaaaatttcattacgtaacgatttcttgtttaattaataatcaatttcatacattcatatagtttattcgcatgagggataacctgaccacacacaaggaatttatcgcagcggttcaagaacaactcatgggattcatcaacgaagaaatccttgatcccaagggtgaattctactacgacagaaacacaattcaccggtccttagcttctgagctagcagcgactactactacgtcgaaatcgtagctagctagaacatataatggattgtaattaatacatgactacatatgtttctatatgcatgtgtacacattttctataatgtaaatatattttggtcatatatatatctatatacatatgcatttgcataacatatatatgtataaatacatatatattatgcatgtatatacatataatataatataatatatatatatacatatatatatatatgtatgcatatatatgtattgaaacatatatatgcatggtttatatatatatatatatatatatatatatatatatatatatatatataaaccatgcagcaacagggccatgcaaaaaaaaaaaaaggtcagctcgatctttagtcccggttatttcacccgggactaaagatagcgatctttagtcccggattggtacttccggtttggaaaccgggactaaagggggttacgaaccgggactacaaagggtttctccaccagtgaacgcacccagtccacgtaggctcctctcctcttcttcctctctcttctccttccttctctccttccttctctcttcctctccacttcttccttctcctctcctctcctccatccaccgaggcagcagcgtggcggggcactccccatcaggggcagagccaggataaaattataatggggctaaaccaaagtgcctgccgccactctgcctggaacgtcgtgcactcgtgcttgtctgctagctgccgcccgccgcccgcggtgccgcccctactcccttgctgctccgcgtctccgcctctctttgcgcctctacggcaagagcgactgatggagatttagggttgggtggggattttttttttggccttctcagccttttgggcattctgatatgtggattagaattttacggggtattatggaggctctaatggtccattaggggatagggggtataaagacctcccccgtccccacgctgtctccgccactgttgaactataataataagtgagcagtgttctttttgacatgttgataatcttaaaaaataaaaatgtatagagaacaattataagtttcaatcacaagttcacaacctcactgaacttgaactatcaagacacaattttatttatactagcaaacatacccgtgcgttgcaacgggtgaaaaaactaatgataatatacgttttacatgtataaccatgttgatgacaaacaaaaaattagaaaattggaacatcttaaacgtaatggcccaacctcaatgatggcaaccttaccgatatttgctttacctaaaataattagattattcatatgacaacatttaatcccattcttgcaaccaatcaaatcctagactgcctcacatggtcaagtctatacaaaactacacaaaatagagtcactgtgcactattctctaaataacaattaaaatatgtttattttctaatattatttccatataatatgttatcaagaatagtagcttttgttcataaaaatagtctgataattgcctacagagatgtgcagggtatccaatacagaagaatagatgacgaaacaaaagctgtgtatgagatggaaaaaatcgatggatccgatacgaccaagcgtgcatcaatttaccttttttcttacagttttttcctcatatgcttttttttttgctttttttacagacgatggaaatattttttctggcatgttttttttggactacgaaaaccttttgttctagcgcgttttcttttgcacctttttctaacatttcaattttttaaacttttttctcgtgcatttttcttttttaatatatgatggaaacttctttttttaaatagttagattagattaaattagagatagagaagagataaatacggtctactaacactgcgaataaaaattagacttttttgccgtgcttttttccgccctttttttttctcctgcgtttttttacgaacagttttttcgctactttcttatagagtcggacatttctacatgttttttggatttttttatttttacggatttatttttgtttttcactttggaggaatcggatttttttttccgctgtgggaattggatctacgtttcttggtttctttttgggcaggaaacggatttttttttcgtttaggtgggaatcggatatattttttcaatctacgtttttttttcccgttttatgtgggaatcgcatttttttccgccagggaatcggattttttatttttttccgctgtttttttatattgatggacgaaggaaacatctcttattcttatttttttatatataagtagtagagatagagatagagatagagatagagattagaggttagtagtttaccaatttctaacttcaaatcttcaatcagaccatcaataagctgcgtcgttgccacaatgccactgccagccacagcccacagcgggtcagcggcacagtggcgtttcctgcctgccttgccgccttgcacccctgcttgcaccctcgccggagagaggctcgccacctcctgatcttcgctgtggcgcgacggcgctggacgcctggactgccgcgcgcggcgccggctggccggctggccggcctccagtcttgcccctcgccgtagcgccactagctcgtcgaaagccaccgcctgcttgccgctcgacctcgccggacaccgccgcctgctcatcgcccacaccgcgcccgccgcccgtgcctagccgcctagggctatggatttaggagagaggaagaggaggtggccggcggcagtgggattagggaatcgacgaatcgtggaggccaggagggggagaggctggttgggggagtggctgagccgagtgggccttaactaggagttggccgggccaaaatttaaagactgcgctcgtggactcgtggttgtagactgttcttcgaatccagccaaatcgcgaactgcttcgtcttcaacctcgctccagcctccctttcagctgacttgacgaagctcagcccccacatcccatggaaatttttagtgggggcttagaggggtcttcaagggcaagggggcggtagtggggtctcaagacccccccccccccgcccccatggcaaatccgcccctgctccccaccaccagatccagcgggaggagaaggcggtggtccggcggaagcacggcggtgtcctcccctccgttagatctggcgggaggggaggcggcgacatggaggggccatcccctccgaaaaattgggcaggaggagaggcggcgacccgatagcgagagacggtgtgcggcaggccaccgctgggagatgatgtgtggcggcaggagggaggcagcccgtgcccctcggtagcaggaggcagcatgtagcggtgggagggaggcaacccatgccggatctggcagcgtggcggcgctcgccccttggctgcagggatctggcagtggggccaccggctggaggtgtggcgcggcgacgtcaaccggcggggaggtggggctgccggctagaggtgcgacggcatcggcggccgacagatccatccctcccactccctccctatttgtgattttatttgatctagatgtgttgtttttctaaggattattgattgtagctcgtgttcatggatttgaggaaatcttgggatttgggtattatttgggatcggcttgatggctcaatgaatcgagccaactatttttggctagtgtgcatctcaaaagtgccggcacctataacgttttcttagtagtgaaagatttgtatatatacttttagtactattacgtctattgtgtaatgtctcatcttgaaattaattatagagtaaattgcatcactggtacacgaacttatcaggtgggtgcaatctagtgcacgaacttgtaaaatgcttgttttttgcataaacttgtctagggcgtgcggagaaagacaaaaagaacactacatagctaatcttattgatttagaggctgattaggattactatataaacatatatctgagaaggtctctattagacatacacctcttcaataaaaatagaatggatatagtgatcatagaaaacaaaacgagcaatgatataagggttagaaatatatgaaattcatcatttccatgacgaaggacaaagtagagaccaaatttaaaaatattgcatatcttatgtatactcactacacgtcagcatggcacgtcctaatcaacatcagcttcataaaattaacattgccaagctattttgatctcatttgcacaaactagacaagttcgtgtaccgaaacgagcattttacaagtttatatactaaattacacccacctaacaagtttgtgtaccaccaatgcaatttactcttaattatgtttcttaattatgtttagtgaaaaaggagatagagttctcatagatttatactcttaaaactgtcaaaatttttattttttagttatagctaaaatataatgaattagaaattaagaatctacacgtattgtaatattattggaagtatatataattttctttagaattttttgtgaaatttattagttgttgtgcacgatatgtacacggaaattttgtgtgaacaaagatatattcccatactacgtatctttatttactactctcattgagaatactgcttacatttttgtatatgtaaaggtatcccaacgtatggataaagatataaatagagaagaaatcatgccgatttaaggaaaaggattttgtaatccgatccgggtatgatagggccttgtttgcgagattgctaagggccggggcgatcgatcgcccctagtgatcagttcggatctcccctccctccacctggttttctttttgttgtcaccgcattactttcctattttagtaaatttatgcacctaaagtttgtacgcctcaagtttacacatctaaagtttagagagacccaaagtttataaatcaaaagtttatatatccaattcaaatttgaatttgaattcaaatattttttatatatagtatttctatacatctaaagtttatacacctaaagtttatagacccaaagtttataagtcaaaagtttatatacccgattcaaatttgaatttgaattatatccgattcaaatttgaatttgaattcaaatattttttatatatagtatttctatacatctaaagtttatacacctaaagtttatagacccaaagtttataagtcaaaagtttacatacccaaatcaaatttgaatttgaattcaaatattttttatatataatatttctacacatctaaagtttatacacctaaagtgtaacaccatgaaaatttctgtcctgatttgcgaaattaaaatttcgtgttaatcaaaaatcttttccaaaatccatcatgttggcttttattggattctatctcccctttttcggttgcgcttggaccacgaggacggaaatctagaaacaaaatatatttttgattcaaatactattttgttaaaagaaccatgattatgaaatatattaattaagaaaatatttgtaaatgccatttgtctttctgtgaaccatttctttgaaatagaacctacttgaggtatttgtattatgaataaaaaaataaatactaaatatttagaaaacatactttgagagatatttccccgaggaaactatttttacaaatgagggctaatattagttaacttctaaaaaccctattttgaaattataagtgtttgggaattatttttacaaataaagactagaaggaatttactagcaaaactctatttacgaactaaaatcttaaatgagttatttcaaaagaattcacggaaaagtatagttttcctccttgaaaggcctagcttacccgcataatgggatttgtattatttgtttgcatttgtatgtttgtgccaaggatctcggttaatccatccttgtgaatccaatccttgtcgtatttcctccggaatcatattccgtagttcaatccttcttctcaatcgaacccctcccgaaccaatttgttctggtgtctggaattgctcgaactcagtatttcccccagaaccacctctcagagtaatatccattcactgtcctttcaaccctcccaagttattgtaataccccgtcgtttccttgaattgttggaataccgcgattaaatcgatccacctaaaggatgttctccagtcgacatccttccttgccctctttcctctccgactaatttgctaagcgtttcggtgaagctaatcaaagccccgaaaccctttcctttgtcataacatcgcttccttcctcagaccgattgaacactagagttgagcctgagttgtcccgtctattcgactcggctctccccggattccattctcccatattccttctacttaaaatcccagagttcggccattcgcttgaaactctaaaatcgctcgacgaatttaactgtcgtgcgtcgactcgtatattctcgactctaattctacctttgaaccccaccgcgacaaatggatttgtatgccatacgccgcacctagacctatcgtctatatcatccctaccgttgaaacattaccgcatcgcatagattcttatgccaaacgtcgtttctaaaatccatcgatatcatcgtctttacattcaagcagccgcaaggacatcctaagttaaatacttgggcgactgagcggccaaattgaatccaatccaattacccaaattaaacagcccatttatagttccaactcccatttacaaatttcagcccaaagtcaaatgtccgaatatacagtccttttacagttatgcaatcctattacatgaagtacctacagtccatctacagtttccaaattacaaatccccttcacaaattccatttgcagttctacagaatattcctattacaactgggcttttcttttccctctcagcccagcatatcagaagtctatttctacaccctctcccccttgtgacccaagtctgtttcccctccttcttttccccagccggctgcacatgcacaccacctgctcgacgaaatgtcgagccaggctgagtggcatgccgagccaggcaggctgacgcgccgcaccatgcagcagcacgccgctgaatcatgatgtcaaatttttgttcaaattctaccatgtcttcgtactcatacatgcatgcattaaaatctgacaaaatacttgtgtcttcattgttctcctcattcttctctccacctaaatgtttgatagcattctacataatgggaatgtccattatgaccttttagaaaagtctcaaacaaccgtttgaaggactgaaatgtctcatcatacatgagagcagcaccaaaaaattaaaaattacagtttctctaaagtgattgaatcccacaaagacaccaaacggcctactctcattgcttgttccaaaagtagtatcaaaactaacaacatcaccaaaacgtgcgtaatctgcgatcattttagcatcaacccataatatgttagctattagttcttcaccatccatttgcaatgcatattggaatgatgggcaatcggcaattttgtcttgaaaatacttaagcatgctacttgcttggccatatgccatctcctgctgccacttggtccgcaaatagttcttgtggtctcggagcgtgtagctaagattgagtgatacgccaacttggtatgatctgccatttcaatttgaaaagcttgtaaatctgaaatttttcttagtgacaccattaaatgtaaagtttccagcatgtatagtgcatggttgtgttccaatatcagatcagacactatataattgtgcttctttctatccattttaagattcatgtggacttgacaatctgttctagtttcagctcaaggacacttgttaaatgattcctttcgttttgcaatcgatgaccttcgtttgcacaaacaaatctacatgatgtaacactaccatctgacggccatctgtttgtataccttttcctgacctcaaaacctttctgtccacagtagctaagccaaaatgcccaagccacatctgaatttgtaaattccatgccaacttgaggtaccaaactaggcatcaagttatttctgtattgaaaaaaaaaaacactactgagtatgaaactagtgcatagatatgctaacaaaaaaatcgccaaaaccatgctgtaaacattgattacatattggcacacatattcttagagaacattcatggccttgtagttgtattacacacctatgtgcttccatcgctggactatttgacatagtttgatggcaagcctcaattgcttcttccatgagaaaaggggaaacttgatcgatttcaaagcaacctaatggtggaagtttgattcagtgagccattcatgagaagtagagggcataagagagagttcaagctttgaagtgcagaaaagctcctgtccagcgatcacctcctccactcatgccaaaacatcaacaagattgttccatctgggtatagcgatcgctgctcgtcggctactcgtgccaaaacgcccgagcgagttccttctcgtgccctttgctgccgatcccatccactgaagtgtctttttacctccctctgcatggtctgcaaatgggccaaaaggagcaactgggcatcactctagggccgaacgacggagaaccgagcagctggacatcgatgtagaaaatcgcaccgtcaaattcagaatgaacgcagatgaagcgaactacgtccctctgacatagattcatctacgttagaggatctgcttctgtgatttcactgccgtattgctatcacagagggtgtggacataggttttggattgcaaagggtgaactcatcctttgtatattagtactagaaaaaatactcgtgtgttgcaacaggtgaagtctattttaatcttattattgttatatgatttagttaagatgaaattcactatgggagttcgcttggatatatatatttttagaaaatcatgagctgcagttaggagtccgatcgtcttaagttagcacgcaagttttttaaaacagatttcttatatgattccttctgtattaccaaaaatgaacgatcttaaaaaccgactcaaatacggatatgtatttccaaaagcaaacgaacttaaaaaccgactcatgacgtactaaaataccgacaaaaacatcttcaatttttataatagtagagatagattttactttttagtattcttatttgttaaattgcaatttatcatctggattttgaagaataaattaaatttacatctcgatgatttgtcctttcttttcttagcgcttacaaattatataacgaaggtggttcagcagataggctcgcaagccaactcgaacaggaagcgagccgagctgagctcatgagctcgtttccctaaccgagtctagccaagactagtttcttacgaccctttgcaagccgagctgagccagtgacccgcccattagtcttcactctaccttatcatgtacagtcaacaatcacgtccgcatttgccttttttttaaaaaaaaaagattctaagaaatgttggaagtgctgattggggctttaccgctgatcattgcaaatgtactagcaaacctcttggcaaatcaaggtagaggctaacctgtagtgtaccatagtcaatattacatggaaatacgataaagtgtacattagtgggtgcatggtatataaataaatggaacctggtagcgacaaaaaaccatgatggttttgttggcagtgactatggtacacagttgtaattctggttcagctgttgtaccgatatttgtttatgtgcttggtaattcgtccagattaaatagtttaagggtgtgaaatatccgaaattgtagatataagggtaaatcatgcttttccgatagttgagtgtaaactaagaacaaaaaataattgttgtaatccaataattgatcctgttggttaggatggttaaccaaattaatcaaaaaattagtattgttccataagtagcaaactattagaaccaattaataagtctggaaccatttaatccataatcgcgagcaaagttttctacgacaaaacattccaacgacgcaacaaatgacgatataataggtggtgttgccaagaatgcaacacatgaggatatagttattttgtgatgattgctacatgtattttgttagctgtgtaaaaaccatgctaaaattgtgcccaaatcctgtctttctttttcttcaaaatatccaattttatcaaactagaaaggaaggccgcgcttatacgcgggcatctaatttaatgttgcttgaaatattactctatacatgtgaatataaatttttatatgcgtgactgttcctgattctattctcaacctgttttttttgtcaatattttgtctgtgactattttaaatgctaattatccttgcaacacatacattctaaactaaatttacttacaaccatgaaatcttgaattataggaaagtattatgttgcaacaatagagttggctcctatgaactgtcatctaaactatatgtactttttaatacatatcaaatcttcgttttgggttctaaactttaagaaattcattttcttaagaatagttattgaacttcatgcaaaaaagttcaaatgatttttgcaatttatatcgggctttggatacaagaaaatatgtttaaatttagcccaatttcatttgaattccagttgtcctttctatttctttttcttttggaatattagaggcctacattctatcaatcattcttgaaatgattttgatatcataaagttgggatgtgatcagaactatgttactatgttgagtgtacaactcggtatgggataaatgcgtcctttacaaaatcttgcctccaaaattgagccaaaaatattataacagtagacatagtgtgttttacttcctccgagatcaatatgtatatgagacatcaatgtgagtatgcattcagggacatgtaaaaatttgattttaactgttgcaaataaaaaacagaggaaagaaggcgcatatgtacttgttgtagccatgcatggaaaatattttagaattttatttgttagatagatctaactgtctagaacaatcagtttattagaaatgttgtcaccataaaagagcattaaatatcttttaactactaaatctaactaccaaaataacaggggaaaaggggcatgataaggaaacggctacggttcccggttttgtcccaatctttcacagtgctctctatgtgtgcagcgataatatatatactgtaatctccatttgaataactcaagagcagcagcagtattaagatgactagtcgccaacccgtgcgttgcacgggttattagtattgatagtaaatattaaattctaattaaataggtggattaccattcaaattataaatgctcatattaaaagaaaaagagtgcactttagctacaacttcttaactataattctgaattttataataaactaacaaaacactaaaattctgaaattgaggatgcaaaataagtatgacatcatgtttattaattataaatttcagaattattgaattatagttcatatgatttcaaattgcatgagttatttaataatgtgatccatcaaattaacgtgcattgagcgagctattattattcttattataagtaataaaattttagtaataagcgaaacatgttagttatttttcaaattatacccatctcgtgcaaaagaagagtatgtgttagttacaacttgataattattaatttctaattaaaaaaataaatgctaatttgaaaaggaaaaaatggattaggaatgtattatattcgtcaacacaatcatatattgattgaaaaaaaaaatatattaggacaaagtatggggcaagtttagtagctatataggtattacttattagggggaaaattgcaacaaaatttattatttcaagagattttaatcaaagtcagaacgggaaagtataaaataggtcatatggaacattgaaagttggacagaatacttgtgtaaattgcacgtgtgacgacagtggatagatcttcttatatgcaagcgggctatttgagtgatttgagtaatagatcagtatattctctctgcttcaaaatgttattgacagcctaattttgaactatgggacttttttttgcttttcattaaattgattatcttacggacataacatctcattcaatatatgcaaaagctcagcaacatatttcattattgcaatcaaaatcagaaatctcaagaatatattaaatgtgtcacatttgatatccaaatttggcacaatacatcaaaaatcagaaatcgataatttcaatagaataccctgtgaaatagcaaggttgattccaaagaaaggattttgtgcagtaccagttgcagcgtgcgatgtgcttgaaaaatccattgatgattaatatgcagataaaaaattaaaacatgtttcccataaaaaagaattaaaatatacttgctttgtttcatattataagtcgtttggacttttttctaatgaaactttttaggtttgtctaagtttatagaaaaatctaacaacatataccacaccaaattagtttcattaaatataatattgaatatattttgattgtatatatgtttgttttgtgttgaaaatgttgcaatattttcatataaacttagtcagacttgtaatatgaaatggagggattacttacaaaggccacgctcgtgcttgggacattagcatcattttttttaatgaaagatcattatattgataaggacattagcatcataggtggccgcatggcacgttgttagactaaggggttgtttggttgcatgccacaagttgccatgcctaaagttagtcatgccacagttttttagctattgtttggttcatgacacaactgtggctagccacacattttctttatatggccccacatgtcatacactagtattttttgctaactttggctaagttgtggctagcattttgctagccacatattttgtggcagccacaccttgtctaatatggggtctgccaaagttagtaagcaaccaaacatcccttaatagcgtgtgaatggcttgataggccgagtcatgtagggcagggcagctagagatatcgtatccttgtgagttagagttactatgaggctcctggctcagatggcatatcggtccaagtgcgggatgctacctctaagtttttttttttcatattcgtccctgaaaaattatatatttttttaattgaggtatattcctctctggtactacctccgtttcgaaatgtttgacgccgttgactttttagcacatgtttgaccgttcgtcttattcaaaaaatttaagtaattattaattctttttctatcatttgattcattgttaaatatattttcatgtagacatataattttacatattttacaaaagtttttaaataagacgaacggtcaaacatgtgctaaaaagtcaacggtgtcagacatttcgaaatacataccatgtatgggagaggaggaaaggactagatgtctacaacgctggaaggtggagggaccggtaggtaggagtttggggctggcatctctagcagggaagatagagaatggcagcgttcgggagacgggagacgacggtatgtcggtagcaataacaatactctcttcgttcaaaaaaacgaatataatgaatttagatagatgtatatccagatttatagtattagaatatgccacaactagtatttgattggtcttttatgggacggagggagcagtgaggagaggagggcgtccagcctggacagtagcgtggaagaaggtgggagccacagtcaaggctgcgagtcatttctcgaatctactacttatttatcttataagtaacgagaggatagctgatgaacgaaaacaatatgttattatacctttgctttttaatacacgacgttattaatttaaagatatttgtttcggtccaaaaaaaatatcttgaggtatcagtacctcatgataccaaattattttcgatcattggatctaacaatgttcattctatctaagctagatccaacgatatgaaacaatttagtaccgtgagtacttgtatctcaagatactttttgctagacgggagtaaatctctaacctttataataggacgtgactacactgagagtgctagctggatagtgctaaagagagacacccttctttccaaaaaaaaaaagctactagtacactcaatatctatgtttttttccttcttagagaagtttcccttaatttacttatccgatttataatccgattacgccattgtgttcgttacaattaaatctttacaacaagatctcacatgattatattttgatgaaaaatcataaattacttttatgatatgtctaaattacttttagatttcactaagttacttcttaaactataaaagtaaattcagtaagtctaaaagtaatttttatatagtattatagaagtaacttagaacaaaacgaagataactttggtatgtcatttgaagtaaatccgttgtagagataaaaacatgactctatctagaaattaaattaatcagcacaaattatggaattaactaaaaagtcatattttatccctacaacgaatttacttctaatgttgtgacaaagttacttccgttttgttttaagttacttttagaatatatgtaaattacttttagactttattgaatttacttttatatgtataagaagtaatttagtcaaatctaaaagtaacatatatatatatatatatatatatatatatatatatatatatatatatatatatatatatatatgataaaagtaacttatgtatataataaaaataatttacaaatataaatattttttcatcgtaacataatcatgtaagatcttgttgtgaaaatttaattgtaacgaacataatggtgtaatcggattgtagatcggataagtaatttgagaggaaactttatttgaataggaaaaagacaccgacgtggatgaacatcacgacgacgtgcacagttagacggctttgagatgtgtcgcgctacagagttaaaccgagagcgctctcgaaatagatttcgcgtttataatagcatacgaccgttcatttgactattagctagacggtttggcacttttttgcttgtttgaatttaagttgaattcacaattagttttaatggcattggtgtgagaagacccagcatgaaaaaaaaagttaatgtctctgcaatttagttttctaagttatattctaattttcaggatgttacccgcacaacagagagggaaataggccgatggaggcgctgggcggcttctccatctcgccttgagccggtggccttgaatgtgattgctgtgattttctcctcctcctccgatcgccgatctgaggtcacctgcgagtgcgtctggtctagtggccaggtgtcaccaccagttggaccctcggcgcctagttgcttaatctatctatctatctatctatctattattatatatactaaaagtccattaaacttcctataaacgctctcaagccgccacgtgagactcctacaaacgctcctaggccgccacgtggctctatctaatctaaccgtcgattttcacttaaattggtggacccaatattttagaccattagattatattttcacttaaatcggtggacccgatattttaggctattagattagatgtattttattttaaagaaactaattccttactctgatacgtacgtatacaggagaaacatcatacctacgtacaacgagggaaccaatgaagcttaccaattgttggcgtcagaagaaaaaaaaaactacgcacaaaattactataaaatcaataagaaaaaaaacatacgtacttagtaccatgcgaaaaaattgatgatatttaaaataagattttctattatttaaagataaagttcattaaatttcctataaacgctctcaagccgccacgtgagactcctagaaacgctcataggccgccacgtggctctatctaatctaaccgtcgattttcacttaaattggtggacccaatattttagaccattagattatattttcacttaaatcggtggacccgatattttaggccattagattagatgtattttattttaaagaaactaattccttactctaatacgtacgtatacaggagaaacatcatacgtacgtacaacgagggaaccaatgaagcttaccaattgttggcgtcagaagaaaaaaaaactacgcacaaaattactataaaatcaataagaaaaaaaaaacatacgtagttagtaccatgcgaaaaaattgatgatatttaaaataggattttctattatttaaagatataaaacattttactctataaatttacataaatatcaccattgattttcatttaaattggcagaccctatcgatgttttagaatactagattagatgtacccattataaactaaaagttcattaaactttttaaaaataatcctccatatgacatcctacaaacattcctaagttggcacgtgatgctctaataaattagtgatttttttaaaatttctaaaacaatttggtgaacacattatttacaaccattagattaattttcaagaaaacatttctctcctatacccaggcccacctaagcctgtatgtataagttaattttttttagaaaaaaacaagcagacgtatgtacgcctcctcttccttcaattcatatctccacatttttacctattccttctccttttttcatgctttattagttagataagtaataattttgtgttaaacaattaatcttctaaatcatacaactaatgatccgcgtaaatctctagattatttataactaaatttatggttgaagaccatatttcactattatttagcttaaaaaatatcattttggtttatattttctgacttttgcgtaccattcaagcaactaaaaaaaatataataataataatacagattttttcatcatacataacttcgtaataattaaaataggtcgacaatcgtaaaagtaaaatgaatatattatgagtaatgtctccaaagtatgttagttaggtagtaaaacttatgtaaaaaataagcaactataacatctaaatcaaacaactagtatttgattaacttatgtctttagattgttttacatttaaagacccatatccactgtaatatcaactttgagaagaaatatgtcactttggggctatattttctaatttttgtgtgcttttcgaacaattataaaattatagaaagataattacatagaatttatcaccatatatgacttcggaataattaaatttgatctatatggaaaaaagtatgttttaaaaactactcccccagtataacattagaataagtcaaaaaaacattattacaatataacattattagattgtagtgttcgtatttttaatatctactgtgaatatactggaaaagacaagcaaaaaagatatattttaatcaatcaatagaaactaagacactacaaccccataaaaggaagtattacaattatatgcacgcgtaatctcttcccttaagctctctcttcctctcatctctcatttaattcctttatctcctaatttttaactaagtaaaaaaagatcaataattagaaagctaaatgattataattattaagttcaataataattttcacttatttgaatttttgttttatttataattaaatagataatttaagatccatgttacccatatttcactctataaaaatgaaaatacatcatttaacatagacactgttcctttgcatcgtagccaaatagaaaaaagacaacataatacaaaatgaaaataagtattatattaccataaatcattgtacatcctctgagcgcacttaagacgtcacgtgttacgccttaaataaaaataaaactttacgaattggaagaaaaaccatctgaccatcagtttccactcaaataggtagatccatcagatatacttttaggaaaatcttaagccgccatgtgttacgtcttaatcattagataaaatagaaaaaaccacccctccacttcgccctcccctacacatactcacaacacgacactactcgtcccatcccttctcggcttgagctgtccactctatcccttcctgtttatacagcgagaaataatcaaaaatattaaaacatgcattaatttaaagctacacatcttatttctaatctaaatattgttgtatttataattaaaccaatgatttaaagatccataaaacctatattttgaactggtataaaatataaaataaagcaagcaatagaatatgtcaatagggagtcaattgaactatttagagaaaacgtaataagttcgtaaaaaattggttcttccattcactaaaattagaccaaccattgcatgttccattttcataataattttaaaatgcttagacattaatggccttacatctatcctatatcatagcattatgagtttctccacatattattacacatataaaccacacaaaggttcacaatatatagttcattgaaaacttatatttgttactattagatttaaaattttggattcatattaactaggtattttcttttgaaaaatatagtataggtcacacaaatcacgaggaagcgaggtatatgacatgcctttattaatttatatataagtatgtaacaacttgcatcatcttaaaccaactagaaggagaactacttgatggtaccgataaaacatatttattaacaataatagttctttagaatttgttaagaaagcaagtagacattcaattaaaaaaatgacaaaacaccttatttctaatttacacttgatttgttagacacgttttccaaacaaactgaatcgatcatctttctatataataataagatcatagatgattatttatacatatgtattaaataatatatattttaaaacataacaaatatataggaaaaattatcaaagcaaaataccgatgaacagcggaggcctcacctgatgtgtcttaaaaataatatttgtgtgtgtgtatatatatatatatatataatataatatatatttttcaaacagaatgtacaatacttgcccgcgcgaatgcgcgggctaccttcctagttaattatagcaattagtcttctatttttctcacctttgctggaccgttcaatattatgtttattatatcgcgatgtttgtttcctatgattggtttctgtttttttggcaatttttaaggaagagcgatctttgtctccaagcgtaagaatatgtgcagtaggccagcagcttccgtgctcgggttgccaaacctcagctgccgtcagcgttgcatcttgaggatgactcagccactgtggctgatcgattagggaaggagattgaaatgggtttggttaggctttcttttttcttgtggatataggtcttgtacgataattgtacgatgaaacacttctccagtgtttagtaacggctgtaagtttggttggtcccacatggatggatttatcttgtattgctcggcccatatgtatattaaaataaattgcaaagcaaagtttatgatgacatattttgtaaagcaaaatttatattaaaataatataaaaaatatacaagcgttaattacatggtcttactcttagacattgcattggaaaaaaaaaaagaaagactagcgtaacaaagaatatgttcgtgaggcccaagcaaataataagatggacataccggattagtattgttgtagattagattagaccgtcagcttagatattaatttaggtttatacagcataaataagaggtaaaagacggctattgagtttgtaaactttgtatatgggcttctgggccatgatcgacttgtattctcattatgtatctctgttgctgtgtcgtctgtttggtccgcgtttgatcgtactaaattacgtaagtgagaatcatacgtgaagtattttcctttagattcaaacctttttttcttcaatcttccaattttttcatcacatcaaatgtttggacacatgcatggagcattaaatatggacgaaaaaaatctaattgcacaatttgcatgtaaattgcgagacgaatcttttgagtctaattacaccatgatttgacaatgtggtgctacaataaacatttaccaatgatagattaattaggcttaatagattcgtcttacagtttacaggcagaatccgtaatttgttttgtttttattctatgattaatacttcaaatgtgtatgtatacttcaaaaaaatgttggaccacgaactaaacacagccataatgtttggataggctgaggatgttatccagatttatagctaaaaatatttatattttggaacggatggagtaattaactgatgctgtaagttgggttgagagtagaagagtcaaaatgttgctccccacttcactcatatcctttttttaaaaaaaataaacaaaagtaatgcgcagagagaatgttaccaataaatttatttacgaaatgtccgttaaattttctacaaacgctcgtaagccaacacgtgtcatcatacaaaacctcataagccgctacatggtacactaagaaatctattatatactaaaagtatattaaatttactataaaaactcttaaatcgtcacgtgacctataaacgctcctaaatcaccatataaagttatttgtaaaattcataaaaattcgtacaaacatctaaccactgatcgatttttctttaaatcgatggaaccactaaatttaaccattagatctacatctaaaagaaaaaaaaatcggcatccccacttcccatcaccaccgtccatatccacatactccctccacaccctccacacccttcgaactctcccctcctctcctattttctaaaaaataagaaactataacatctgcatcaaaaactaatatttgatccgcttatgtctttacattcaaagacacatatccactataattcaactttgaaataaatgtatcattttagggctatatttttttgatttttttcgtgtcattcaaacaattgtaaaattgtaaaacgataatatatattttatcatcatatatagcttcacaataactaaaatgaaccaaaatccaattaatgttctaaaaaatactcccccattcaaataatataataagtcaaagtaacattactagattaatttgtggtgttcatcttttttattatctactatgaatatgctataggaaaagatgagtaaaaacgatagattttaatcaatcaataaagcttatttagttaacaaattaataacaagtaaaacactataatttaattctctccccttcgactctctcttcctctattctctcattcatttccttcgtctcctaacttttaactaattaatacaaaatgaccaataattaggaagctaaatgattataattcttaagttatgtcatatttttagtttattagaatttttgttttatttataattaaatcaataatttaagatccatattacctatatttcactgtataaaaataaaaatatgttatttgaacatagacacatatcctttgcatagtaacaaaaaagaaaaaaaaagtataacactaaaaaatgacaataagtattatatcaccctaaagcattgtacgttcttagcagttcacttaagacgtcacatgttatgtcttaaataaaaataaaaccttataagttggaagaaagaaacatctaaccatcagtttccacttaaataggtgatccattattttttagccaataggtatactattaaaaaaatcttaagccatcatgtattatgtcttaaaaattagaaaagaagagatattagaaaatatgagaaaaaaaatcagatcatcgattttcactttaaaccatttagaaaaatagaaaaaaaaacacccctccacttcgtcctcccccacacatgcacaacacagcactacccatcccctttcctctcggcttgaactgtccactcttcctgttttttagcatgaaataataaaaaatattaaaacatgcataacttttaagatacgtatctaacctctaatctaactattgttgtattcatagttaaaccaacaatctaaaaatccataacgcctatattttgaactggtataaaataaaacaagaaatagaaaatgtcaatagggactaattaaattcaacaatttggagaaaatgtaacaagttggtaaaaaaatggttattacaaaattgatgttccattttcataacaatttttgaatgcttatatattaattttttttaggtaatggaatataatatcccggcctttactcaaaagagctacatccaattattacatagaagcgttcaagaatatagtgtaaatctaaatgaatagaacacatcgtaaagaaaaacaaagaatctagcctaacataaggagatcacaattattgaagtctatttgtaaatctccaaccataattggtaaaaagttgcataaccgtagtctctaacttccggcatgcaactttcagaaactcttcatcttcatcacacctttgtagttgtgtccaaaaccggaactaatgaattgctttgaaaatgacctgcatataggaaaatgatggtgatttatcaaaaatcatatcgttcctactcagctatattgcccaacaaatggcagaagctccaacaagtatcagtttactcattttcttatcaactcccaaatgccacgcatcaagaatatgagatatgctaactggaagattaaaaccaaaagagaactggactactctccatataaacttcgcaaaatgacaatctatatatattatatatattaatggccttacatctatcttgtatcgtagtattaccggtttctctgcatattattgcatataagtcacactaaggttgaaaagttatatttgttattattaaagttattttttttgattcatcagaactagctattttcttttaaaaaagatagtataaataacacatattacaaaggaaggagtaattgctaaacccaatacggtgataggccgcccctcttgtggtctctgagactgagtcacttgcaatatctacatgtttcatgtggagtaagtcaaatcacctcgctcgctttgcttcgacgaaacttcgacgacgcgttctcaccttcttccacgatgaaacggcgggaaccatttacgcgccacaatcgcgccaattatataagctgagccacaccgccatagaccaagcaacggtaaacaagcacacatccacacacaagcacacatccacacaacggcaattaatcattgcagagagctagcagctaggttagttaggtgagcagtggctgcaaggggcaagccatggcatctgtggagacgtgggtagggttcgggtcggccctggccggcgtcggcttgctttggtcgaggatgccggagcacgtccatgacgaggctaggtacatcatcagtagcctggtccccatggcgatatcctacttcaacccctacgagcagatcaccgtgtccgagtacggcgaggagcggttccgacgcaacaagatgtttgacgccgtctccacctacctgagccgcgtgtgcgccggtggcgcctgcaagctcaaggccgagctctgcaacaacggcagggacgacccaattgtcactctggacgagaatcaggaggtcgtcgacagcttcgacggcgcacgcatgtggtggaggctgtgccccaaggcctccaagaacaagggggccatcaccgtcacctactaccccggggaagcggacaagccgcgctgcttcaagctagtgtttcacaaacgccaccgccagctcgtgctcaactcctacctaccaagcgtcgtccggcgttggcgcgagctaaccgcgatgaaccggcagagacggctgttcaccaaccatgccaatgaggcgaagaagagcgtgtggaccagtgtcccttacaacccccctgcaacgttcgacatgctcgccatggaccacgccaagaaggttgagatcgtggacgatctcacaacgttccagaaggggaaggagtaccactcaaaggttggcaaggcgtggaagcggggctaccttctgcatgggccaccgggcacgggcaagtccaccatgattggggccatggccaacttcctcgactacgacgtctacgacctcgacctaacttccgtcaagaacaacagcgagctgcggaagctattccttgatacgacggacaagtccatcatcgttatagaggacattgacgcgatcgaggtcgaactcactaccaagcgcaagggcaagaaggcagccaacggcgacgaaatccacgacaagcgtatgctgatagagttttccgacaagaacgatgaaaaaagcaaagtgactctgtcgggcctgctcagcttcgtcgacgggctgtggtcggcgtgcggcagtgagcggatcttcatgttcacgacgaaccacattgaccggcttgacccagcactaatccggccagggaggatggacaagcacatcgaaatgtcttactgccgcttcgaggccttcaaggtactcgccaagagctacttggacatcaccgagcactcactattcgctgaaatcgagcggctgctcgacgacactgacacaactccggcagacgtcgccaataacctcatgctgaggagcaagaggaacggtgaaatcagtcgactgctcgacgagatcgatggggcaccgcgggcagatgtggccaaatggtgcaagaggaagagagacacggacgagtgcctggcaggtttcgtagaaatactaaagaaatccaagatggaatctgcaacaactccaatggattcaatggaagaagccaaagaggaacgacctaacgcaaaagaaagctacaaaatggggcggatatatgatgagaactataggttgggaaatgccagctagactccttgttttgtgtttgctattttaccagacttgcgtgtttactagtcacttaaggtttcaaagccatacataaaatggaataatataaaattagtggtgtaacactacttattttctcgatctataattatttcacgctctataatttgtcttgtcaactttcaaatgttgctaaatcttggtaatcacagacttatataactgggtgttgtttgtcgaaaatgcttcgcctcgaatgttcgatgtgggatgaaatattcgagtgggtcccaccaccgaaccagtctcccaccttttcctctccacgttcaaacttatccccattcccttctctcgcattttgctctcttcctctccgcctctcactctttggctatccaccacctcgctgagatgcaatagtaggaggccggcttcccaacctccaccaccactatcagcacctcaccaccactgtatcccatcgaatctagccacgctaagtattgacagtcgttatataccactttcgatcgtcaatatatccaaaataaatatgaactagctatgcttgcatgtatattttgtttaagaatattctatctctacttgtacttggaatattatttgaattcagagattgctgcataaatggaggagaatcgacggaaattaaccgaacaatcaatcgtcgtccgtcgagtggcaaaattttggaacgatggccttacaaaaccatttttaacacctgcgaataagcccaactatcctgccacggagtataaagcccaacaaggaggatctagaccaaaattggaggccagaggagccagcccaggttcggccgaaccctagccagcgccccttattctagccttccacgtggacgctcttgatcactcctcaatgacggttgtggggtatttcggacaattccaaccaccataaccgtcatactcagcatataaaaggaggatgtctcactcactccatcacacactcaagaagaagatcaagttctctcaaatttagtttattgttctagtgctagtggagtaggaatagagttgtttccttcgtccttgagtcttcaggtgatttcgggtataactctagtagctcttcctttctttataagacttacagcattaatgaaatattcttctttatatagtttcggtcttttacataattcctatttcaagtaccgactttagtttgtacttgtctcgatataattgtgtagttatcttactagagatatgtattggtgtgggtttaatgttcgtgcaaatgattgctctatattgagcgcgagggtgtagagtagtatttaataaagtaagtgcggtgcttagattattagatatcattatttagggttatatgccacgggttagtagaggtgggctgctaatggtgacagtttagtacgggtatccctccacattcatatataatcctaagacattttcctagtatgggtactctttcgtattcatttccggtaggatggccatgacgaattgttgttaggaactcggcaattatgggtggtctctcaaaacactacgagagcatacttagagagtattggctacatgattggatactagcaagtgtaaactacggacaactatatactagaagtatatgaatgattctttacttattctttcaccacttagcctagattatattttagcagggtggtccttatatctttcttctgtgtgtcaaccttatcctaccaatgaattaattaacccatatatagactttgatgaatacaagtaatatgtgaattattaacatagtactcttttatcatatcttagattaaataaaaatatgataccttacattactcccaggtgaaatgctacaatcgtatatccttgcgcttacggatcatatctgtgaccataaatataccaagaatatttcggcgctattactgagaattatatgtctagtaatgtcattaagaaatatagacactaagctcaccagtaaaaaacgattcttgcatgtagccaaaacaaattttttgcatgcggctaggcggcctccatgcacccaggtatctgcaaaaatcaaaagtcaaaagtttccacgtgggcagaagcaacagcatgtgaaaatgggattttcgtgtgcggtcacctaagtgaaaataatttcagcgaaaaaatcaaaattccggtaaaaaaaattgacatcctagctccccgattcatcctataccctacttccgaaaccatcatcatcgtcatagcctccaccgtcgccgtcatcgtcatcgcagccgccgccgctcactcctgccacctaaggctgctgtcgtcttcgtcgctgccgccgccgccgccatcgctgtcccgaggtcgccggatccaagcaccgtcatcactcccgagggcggggccggcagatctgctccaagactaccggatccacgtgtcggcgccgctcccaagggttgcggcggtgaatctgcctcgagcccaccggcgccgccgtctccatgcgcccacgagctttacagttgctttcaaatttagtctttatagcagcagtattaacataaggtgaaatttcatatggatatacaactttttgccaaatatcataatccacaaccatcatataagatttcatcttgtcacaccaataaggaaaatcaactccatcaaaaacatgcggcttggtcaaaatcttattaaccatagcaaaaactcaagatctaaagattaaaaaaagcaaacatggctctgataccacttataggatcgaatataagaaccaagcctaccatagggggagggtgaatggtaggaacacaaaaaaaccaaaacttttagaagaaataaattttaccctcaaacccgatgaagtcctcggcatagccgttctgatcgccgtgtgaacaccgatctgactgcaccttttccgctgccacctccttgtctgctatcttctcactgccgccaatatgatcggttgtttgccgctggttagaccaccattatcataccggttagacctcttgccagaagctactttgaccgtgggatcctgaaaaacatgaaaatagattaactttattgcgttaatgtgtttacaaagtgcatctaaagtactctctcaactcacaaactagaatcgaagcaaactataaatttcctctcacaaaaagtcaatatcttccagccttaacccctcttctatagtcaatatcttccagcctcaacccctcttctatttacacctacaacatggttgtccctaccaacaacatgcccatacaactccacactccaatcttttcaaacatggactacaatccaaatttgactcatctttctatacacacacaacaccacgtgtatgccatatgaaaacctttatcttcatgtgcattgttctctagcctgaacattccatgtgatatcttgaccatttggacctcaactagcttctcccaagcctagtctagatccatcactggctatactaccatggtctcaagcaacacctgcacaagaacaacaaagaaactctttatccgagtacaagttcgtaccaacttaactcacatcaacacacaatagtatcacatataaatagaaactttctagaagtcataaacatgaagcaatctagaatttcatgaaaacaacccgaaaccgactccatctacccagtcagacctcccaatcaccaccggtaaaaccggcggcacccatccggtctgaccagtctcccatagctgaccgcactgttcatcctccaaaaacgtggcacgccgcattttcacaaatacttacctttgacaatttttcgtcaccaagattaatcatcacattattttacacatcttacattacacttggttagagttggtgtgatctgtttgttagtggtgatataaaaataaaaatattgcctttggccttagccatagttgccaagaaatgctttcttcctcatattgttgaacagagttacatcagttatgattaggtcattctcagttgctaatgtggtgtatttatatgtcatggaaggtaaaatcatcacggggaaagcaaaaggatgcaaatcatacatttcaagaattagatattactggagtggcattagttgtcatctttaaccaagatttgcttttcggatttcaagaacttcaaagaaacacacttttctgtttactgatgtctgattttgatactctatttgtataaaattactattattgttccttcacatggaaatgcttggtgatgttcttcatttcgttcttcatatccctgtaaagcagaggatctagatagatgtctgtatggcggcagaggccctgatgtcacctgctgcatctttgacactgtgttcaataattcattaaggaatcattaacttcaatgctatgctttggaatatttttctcatgaccaaataaaagagaaaaaaatagagggtttcttcttcaatggggtcagatgcaaaaaaaaaaaaagtaggttttcacttggtaggagctagattaactgtaaataattttaaatcgttcatccttcagatcgtagggagtttttaattaccttgtgatgtgttttgactctgaccgacagttctaacccctgttcaggatttctgccatgaaacagtaggtttttaattgctttctctgctctcaagggtttgccttaacttatgattgtgtgataatttctgtaaactgttaagttgggaaaattatatgttcccactataaattaggtgctattttttttcttatgacacttctcattacattgtcattttatttgtttgattttttattgtccattgtatgaaatctgtcttgtgccgtttagtagcttatttcacacagtaatatttatttcatataaacagctaggcagctgctaaacttcgcatatttatatactgtgcagaaaggtattgtttgaccaacatttagccagtttgatttctggtgtgtcctactctttgtcatttcatatactttcaattgttcaaccctaaaatgattccactaaattttccctacattttgtcaaccggctgcaagaattaaggccgatacatttatttcttcttcattatgattgaacaggctatattttttccttctttgtggtaagattacactgtagataaaaaaaagtatcgttcctatttatagaagaaatcgactcattttttgtcagaagatgtattagcttgacaatacaattcggttcttttgatatttatttttcactgataagatttcaagttcctgatattatatacatgagtaaacaattattattgttcatatacatgcgttaccttgcatttaccaagcccattcaaacattgtcgtgcgcagacgcacactccctctgtcccaaaaatactcaattcgtaggtttccgtgtccaatgtttgaccgtccgtcttatatgaatattttttataattagtattttcattattgttagatgataaaatatgaacaatactttatgcatgacttatcctttaaatttttttttataattttctaaaataagacggacggtcacgatagatacggtttttagacagagggagtacttttctagttgctgtgatattttctcctccggtcgccgatctgaggtcacctgcgactgcgacctgctctggctggtgtggtgtcaccaccagttgaccctcggtgcctagttgcttaattacagcaataaatcttcatttttttttctcacctgcgctggaccgttcattttgtttattagatcgcgatgttcttttttttttcaatgattgatatctgatttttggcaatttttaaggaagagcgatctttgtcaccaagcataagaacattgtgcagacgtaggccatcagcttccaaggccggatggccaatcctcggccgccgtcaccattgcagcttgaggatgactcggcaccgaggctgctcggttagggcaggagattgaaatgtgtttggtttcctttttttccatggatacaaggtttggttaggcttagggtgtaaattaattaactgagctgcaagttgggttgagcgtagaagagtcagttgtgaaatgctgttccccactctactcatatttttttaaaaataataataataacctccaaattataaacaatctagatttacggtgtgttcggtacctcctttttctaacttccctcggtttccacgcgcacgtttttgaaattgctaaagggtgcgttatttaaaaaagtttttatacgaaagttgattaaaaaatcaaattaatccttttttaaaaaaatagctaatacttaattaatcacatgctaataaatcgttccgttttttttactgtttccggttgggaatatgtaatagcgaacacacccataccgatcattaatatgagcggcagctgttgggtaggtcaagctgtcgtttcatatttaaaaaaataaagaaaagaatccaggtcaaataatacgacgtactcctacaatacaaaattgactacttctaccaaagaatacaaaattgactagaattcggaattaaaaaaacggcaaatcgatttctatacggttttcaaatacgtaagcaatctagattaatatgtcatcaataattaggtgagttcggaaacctgtgttgggaacacaagatgtacgtacgaaaaacggagcgatctattagtacgtgattaattaattatttgctattttttaaaaaatagatcaatatgattttttaagaaattttcgtatggaaacttttttgcaaaaagcacgtcgtttaacagtttgaaaaagcgtgcacgtggaaaaagagaggggagagttgggaaaccttacaaaagaacgcacctattaatttatgccgcaacagtacagctataggtggagcgatcgtttccgagcggcatgcaacaaataattaaaccatcaacattacacacattgggtttccaaaaagattatgaccatccaaaatgttttattaaaaataaataatattaaaagagaggttacatctataactggtataaatatttggatttttccagtcgtcacctctcaatgatcgttgttttcattcgctcatgtgttttctacgttcgcgctaagttcgatccgattcatccgcctgcatccgattctgttttggttcggtccatatagaagtacaatacaagcccaaactgatttcagtattctaggtccatctacgagcccatactcacaccaattccaatctatacctaattttcgtcattatgcccgattttccactcgtccgtgcgaaccgttcctcccaatcccaatcgtttgagtccgagtctttcttcaaaaaaaaatccccgagctagatttccaaatcaatcaatcaaccgaacaaccaaaatcaacatggatcgtccgtgcgatccattcctcccaatcgtttgagtccgagtctgtcttaaaaaaaatccctgagctagatccccaaattaatcaataaaccgaacaaccaaaatcaacacggaaataccaaatttaatctcgacctcgtgaatttgatcccaacaagaaacctaatacccatgtattacctccctcccaatccgatccatctgagcaaggaggccatggtacaaaggcagcaggaggcacgtcgggttgtaggcgacgtgcggcggcggaagtgcttggcgcggtcgtcgggcttgtggactagctcgacgcaggacggcggcagggacggcatcagtccttgtggaggggagacggcttccttcttgggcgtcggttgaaggccagcggtcttgagggcagcgtcggcggtgcactcatcgtaggtcccaaggggaggcagcgcttcgagagatctcgtgggcggcgtcgctttctagacgggcggcagcatcaaggcgaccagcgtattcggtggtggtgaggaggacggtgaggcggcgcagctccggagcccttcctcccgccggatctagcggagggagggcggctccaggcggccgccgctcctcccgccgcacaccaccgacaccgccgcacgccgctgccgcggaggggagggcgcggccatctccgcctcccgccgctgccgccggccacaccgtctccacccgccgccgccacccatcacccaccgcctctcctcttgcgtcgccgcctgccgcctccgagagaggagagcgatagagaagaccgagactccgagagagagaggagaggaaaacgagagaaacccacccacccccacccctgcgacgaccagctccggatctggtgacaggagcgagggggaagagcccggatctgaaagaaccaacctaaccttcgccttgctggcctgcgattgtggatctgaccgacgatgagagctaggtctggagttggactctggagagaggaaagaaacgagagacggagagagtgagagagagagcgagaaaaatcaatatgcctctgcagcagctctcggcctttcacgctggtctctgacacggtgacaccactcactgtttcttttcctatttttaatttattgacgataaaaatcaccgattccttatttttaatatttcctgagataacatttttttgagataggggtgtttagaagtagggtgtaaacttttgtcgtatcccatcggatatattgggacacatttgaagtatcaaatgtagactaataacaaaacaaattatagattctgtctgtaaactgtgagacgaatttattaagcttaattaattcgtcattagtaaatgtttactgtagcaccatattgttaaatcatggactaataagccttaaaaaatttgttttgcaatttacacacaatctgtgtaattagttttttttgtctgtatttaatactccatacaagtgttcaaatgttcgatatgacagggtaaaaaattttagggtggaatctacacacaaccatagtctcgttgcaacacataactactgctacctccattataaattaagtttactgttgtatataaatttatgcatcgcccaaactaaatatatggacgcttactccgttatggccctccccttgccccttcttcaactcatgattaattatgtttaattattataaactttcaaatatattgtttattattttaaagcaacttctatattgaaagttttacacaaagcacatcttaataaagaaagtaacaaagccataatatcccacatccttaagacaaagcaattttccctatctcacaaaattgggcacactgttgcatactactcggactcaaacaattgggaggaacggatcgcacggaggagtgaaaaattacacttcaaatctcaataaaaatccaatcagcattttcttttttaaaaatggtggggcccacctctaagacctcgttttccaatctctccccccccccacctctctcatcatcacgcacgggcacaagtggagcggcggcacacggcggtgcgcgtgcggggacgggggcgggggtaggcggtcagccgcaatccctcgcggcggcgcgcacgacggcgcatgcagcacgcggaggcgggcctgcgggggtggggggcgggtggttcaagacgagcggcagagtgagcggcggcgggcgtgactccggtcgacggtgagtccaccacgcgccgacgacgaggaggaggagcccgcggtggcggcggtggcccactcatacagacgaaacaaacaattttgtaagcagattaattatctaaaccaaacaacattttttttgtcactatacacactccgtaatcacccggtgcaacgcacagggcacttttgttagtaaaaaacaaataagactaatttaatttcagaataaaaagaagtaagttagctaagctctaatatgagtgcaaagaatgtaagtggagtaagatcatgagagaatatgtcatcatacaacaatataacatttcttcagtaaaaaaaaacaatataacatttccatgtcaggcaatagacatggaacaacgaaccaacaataaagtaaaagtggtgtagaaataagaagttttcacataggcaagtggcccgccacctctattgatagcatctgcttgagtaatagtacaatcaaagcatgttatagagaaaaaaatatatttaatagttgaaaagttagctaatagaaactgaagaatttatgtccctttgaaagttgaagaaaccaagaaacagtgtggagtgtaaagatagtgtcattatgatattatacaataactagcaaaatgcccgtgcttcgctacgatgtattaaaactaaaaatatttgtttttaaccgaagttattttcacactgctttggtacttttgctcgctagaaaaagtctcaaatgatagagagaaatatagtaactcataataaattagtattcaatagtgcattgcaatgggaaaaataatggtattaacttagtaaagtaataaaaaagagcatccacgttagctcttatggtctagaaattctcatattaattggagtaaaatataaaaaaataaggagaactcattgtagacaaggactctttcattttgttttttttaaaaaaaaccacgttgtccaattggatataagcataaaacaaatcttttgcaaaacaaaaaacctaaactggatagtgtcaacgagtgatactcgtggaccagatgagttaagtattggggtacgttggaacaagggtttacgtagtacgacatcaagcagacaaaagacaatgattatactggttcaggcccccttatcaggtaatagccgtagtccagtttatatgggattgatgatgatgagaacatattacaaagagagtagtcgaaacagagggtaccgacgagatcgtatttgagggattcgacgagatctcccggcgagttggctctccgtactccggcttcgtaaactttggtgggtgtgttggcgaataggttcgacgatcttcaccaccccccagttgtctccttttataccgtagattatcttgacccccaagtaaggcttggagatatgtaatctggcatgatatactagaggttctatcccctccgagtaggactctggtaatttcttaactcgtagagatattttccataattcgagacagattcctaacggtgtatacagaaacgatccatgcgcatgaaggatagagggtatgccttatccgtaaccttgacagtagctcccgacttcaacttaaatgaattaatgttgtcgttcacaacttctcctgatagcgtcttggcgtgctcgctaggtcgatctcggttactaaccgtagagacatggagctatcgacaacgcagaagagaacccaacggtgtgaattttgaatttaaattgaagtctgaaaaactgcctccaacgggccttagaaatttccggcggcaatctctcccctttcctcgaaatgcggatcgtcgggtggtgcgcctatttaatgaaattttgggatccatttcaagtctgttcgccaaaaaaccctcactgttcctcggcttcatcggacttttcgtttccctaaaatccccaatcttcaacaccctacaccggcggtcctctcccggcgatctccttccgatggcggacctcgaccaatcttcctccgacgtggccgcgctgaagaagctgtacaatgagggagccatccctccgaagcagaccatggccaaggaagcaggaggtacttatccttcccccgtcctaggtcgtatggtagcagtagaggatttcatccgctgtggtttcttacctcctccttccgaattccttttattgatcttgaacttctatggcctttctctcttacatctgaaccccaattctattgctttcttgagcatttttgcttacctttgtgaggccaacattggggtagtgcccttccttgacctttttcgtttcttctacgaactccggtggatggaagccaatcgggtttcaggatgttgcggatttcgccttcgtgatggcatgaaggcgaaatacatccctctccaatgccacacatcccagagccaatggaggtcgagatggttctatctcaaaattaaagaacacgacccggttcttgtcatacctgaggtccaaccggaccaatccgagagctggacctctaagcctccgttgacactgtcgacgggggatacccacagaccggatacagagggtattggggtacgctggtacgaggatctacgtaatgcgacatcaagcaaagagaagacaagaattatactggtttaggccccttggtaggtaatagccctagtccagttgatatgggattatattgtagaaaccacagattacaaagggaataatagaactcagcaataccgacaagatcgtagtcgagttggcccgactagatcacccggcgacttggctcctgtaggctccggcttcgtaggctgtggtggatgtgttggcggtgagattcgatgccttaggtcctctcgtggggtcccttttataccgtgggtcagtcgatctccaagtagaactcggagatatcggaccccacacgatatggtaacgacccagttccgtccgagtaggactccttccatctgtggactctgtttatgttacgtgatagatttccttaacatgtacaagaaacacccgtatacgcgcgggtataccatatcagtatacatcgtatattcaaggatggagggtatgccttatccgtaacccttacagtagcccccgacttctgcttaaatgaactcatgcaaccgatagcgacttatgatgtcgaaatcgttgtcgttctcaactggtcgatctcggtgtgggaaccatagagacgaaaagttatcgacaacaccgtatgaagttcaacggtcatgagtgaatttaaattgaagtctgaaaactgtcgcgcgtaacggacccagaattttccggcggcaatctctctcctttccttggaattcgcaccaccggtagtgcgcttatttaaaggagttttgggcatccattttgaagtccgttcgccaaagaactctccagctttcacacgcccctcgtcttctccgcttccgcagaaaaaaccctagcttgctcatcccgatttgttctccggcgatctccggcggtgatggatcttgacaagtccacttccaccaccgcgtccctgaagaagatgtaggacgacggcgcccaccctagtcgcgggaccatggagagggaggcaggaggtattgagcccgaacccctcttgggccgcatggttgcggttgaggattatatttcttgcggttttcttcctccgccctccgaatttcttcttctcgtcttgaatttttatggcctttccttgctccatctgaaccccaaatccattgccttccttagtatcttctcttatctttgtgaggcctacattggggtagagtcatttcttgatccctttcgcttttactacgagttgcgctggatggaaccgaaaaaggtatccggatgtgtcgggtttcgacttcgggatggcctaaagtcgcgatacatccccttccagtgcccctcttctcgtagcaaatggcgggcgaggtggttctatcttcagatagaaaactcggatccagtctttgttgtccttgaggagcaaccagacaagattccagagtggaccgccaaacccgccctaactcccttccttcagtctttcatcgacgttatcgatgacctccgagtacgagggttgtcggggtataaagttgctgccgacttcatcagtaggcggatccaactgctccaggcccaaacccacccggcctttgattatcctgggccgaaggacacgacccgggtttctcctcagggtatttttcttgtattacagatttcattccttatgtgcatgttcctcctgacttattgagttccggttctcgatctacaggtttgaaaagagacactgtagagcaccgcgtcggtcaagtgatgatcagcagccccacgacggcgagcaacatccccgcccctctttgcgagaaggggacggccgagcacgaggctgcgatcaacgtgagtgtactcgatgactcctttacttctgttttcctgggatcgcattgtgacttcatgtacgcaagctctccctttcacggatgtcatcaggccgctcgcggatcaccaggtggcggcgtcgttaaaggagggtgttgccaaggaggcgtccgacattgctgcttctgccacgacgagtggcagcaacgttccgaagaaggggaggaagttctcctccatactcgggaaccgtcagaaggcgcctactccgttggtaagcctctcttgtcttttaatcgtgtagtcaaaatattttgacctcatatcatgctatcttgcttaggcctcggatgcgtctcccccgccccaacgaaggcaaaggctggtgacgctcggcgaaaagtaagtagatgcattacaagtcatcttattcacaaagtcttgattgcctgacttcatgaaatcgcgggaattttttgcagggcggcgcgggcgaaggctgcgcaagacgggtccggtgcggcctccagtggatcccctgcagcggcctcgacagatgtcgtggtcgtggccagggaatgggaggtgacgccaagcggccccgccggtggccttgtgcctgctcagggcctgcctgctgatatcctctcctggggggagctccaatccgagatggagcgtatcctccaggcaggtgctcgaggcgtaggctgcgaaatcgaggaggccagggcagcggcgtcgtcagcgaacgagcgtgccaacatgctagcgcgtgacctggcggaggcccgagaggacctcgtgaagatgagggagctggtggccggcaacgaaaggcagcgacaaggacacgagcaccggatgtcggagctcgagaacattttgtcaaagatccgcggctcgctgcgggtgtcttacactggcctacaccagctcgtcggggagtgctgcgtcacgaccaccattccggcgaaccctgacgagttctcgctgactgacgtcctcgctcgcggaactggccacggcgatggtggagatcccctccaagcatgcggccaggatcggggaggagacatctaacgggatttacaccgcggcgtgccacgtccttgcgtgcgtaaggttggcgcaccctgatctcgaccataagaaggttttggatcaggaggccgccgacgacgcacgtcggggcgtgatcgaggaggtcggtgtcctaggggagtccgtgctccccctttttgaagagtagggttttgtttcccttgtaccccttatccaattatgctgtaaaactttcgtaggttcaaactgcccttgtgtatgcagttgttccccttgttttcttagcatgttgattccgagtactttattgtcgctgtagagatgtcgatgttgaggatgtccagtagcgtgggcaacctaagacgccggttgtcgttccggcacttgcgcttgagccgtacgtgccgcaggacgatgtcgatcaaagcttgtccgtgggagcggacatggcgatgacttccctaggttcgtgccttggttttcacttcctttactcttttgttcgggttgacttaatatgtcgtgttctcgagagagaagaatgacttgacttagtcatttccgtgtttgggcagacctcgagagtgagttggctgacagagatcgtcgaatccaatactggcggacgaagttcgaggtggccgaactcgagaggaccatggtggaagtgaaaaaagaccaagccgtggaagcgctccgaggtcgcgaggtgtggttcaactcgtacctcaggagctgctatatggcaatggctggagtctgccgggaactccaggtacctcgcaggaatcccgaggagtcggcggccagatatatctcgtggttgaatggggcctgcgcccagctcgaaggcatcggcaagcgtagcgacgaggccctgaagcaggagtgtcgtcggtcgagccggtttgtcggagggcacgtgctggcctgtatccgagatcaccgcccacagctgcatctcgagttcctccacgaagggttttcatgttctcggagggctgccgcagagatagacggtctggcgaagtcgatggcgccactcgccgagaaggtctttcagtccatggattggtgttggccgtcctggtagtttttgtatcctgtagaaaatacctcaaggaaacatgtaatatattttggagcatctatgaattgtaagaagtacttgtgaaatagaaaaggaatctatctaactaagttttcttactctggatgtgctgtgtatgagtgttttctcatttcgcaacttcaatcaatcacttgagtcatacactctccctagcccccagccttgtcgtcggagaattgttctcggaggataaggctcttggacccttgacctgcctcggttgaaaaaagcactgaccctagcccccagccgtgaagttggaaaactcaatttccgattacacggcctggttaatatgcacagcgagaactcttacatgaccagatcttacatgatcgtttgtctctacatgatctgacaaggccttatccgctctgggcgtccctagccgaagttcccttaggttcctcagaggccttgtcaagacggcgtaaagggacatgaggataggtttcaacgctaggtgtcgtcgtggtaagggattgtcgggaaggaacattttgcccgaaatttttacctaaaatcaactttatggaaatcatgagatgtcttacaaatatgaatgctattgatttatacatagaatttacgtaattgatcaatattccaggaatttgctaactcgcggccatcgccgtctgcaatcttgaatgcacctggtcgcaagacttgcgtgatcgtgtatggtccctcccacttgggtaagagattgttgcgccctgcttgactttgaacccgtcgaaggacgtaatcgccgatcgaaagtgtgcgtgctctgatgcgcttctcgtggtatcggctgtaacgccccgattttcgttcggaattaaaaatcatttaataatgcattttctggaaattaaataaaagttaaagcaatttaatcaagtgaaataatgggagaatttgaaattttcctttaaaaatcattggccgagaatattttgtaatattctctgtgccctaatatactctccgaaaatttcccgtgaattttcggagctcaataaataattttaataatacaaagttcattaaaccaattaaataaaaaaagaaaacgaattaaagtcctccttctttgctttgggccacttccggcccaagttcccttcccccccaggccggccttccctccctcggcccgctcggctctctctctcgaagtctacttggcgtcccccaaccgtctcctcctctctccttccccccgagccgccgacaggtgggtcccacctgtcagggccatccctaacctccgactccctcagccgaaaccgccgccacggcctccccacgtcgccgccgattccgcctcctcctccacccgcgcgctcgccccgaccgcgggaccgcgtcgccccacctcctccactctcctcccccactttccccctccaaaaccggcgccgaaccaccccacttcgcccacgtcgccggagcccactccgaagaccgttgccggtcgattccgccctccgcggccatgatcccaccgccccgagccaataaaaacgatccccgtggtctcctctcccatttccccaactttcccgagctcccggcgccctcgcccgctctcccctcgccaagccgagcagccgccgctcgccggagttcaccggccactttttcccgccgccccagccaccaccgcgccgcgccgtgtatgccgtcggcttcgcctcgccgtgccgcgccccggcctccactccttttcccccaaaccaccaccgaaataccaccccaccgtgaaaaccgagccgccgctcttccctccgtctccagccgctcgccgccggcgatactgacctcgcccggtcgtgcggctgcctcccacagcgccgccgctccgcgccgcatcccggccaccggcccactcctccaatccacccccgaagcaccattcccgccgcaaacccgagctaccgccatttctaccacctccagccaccgattgccgtcgacggggaccatcccgtgccgcgccgctcagacatccaggttttggggtggagcagcacctcggccaccactccctcggctctaaaacccatcggaacgccatctgccccgcgcgaggtcacggcgccccttggcgtcgccggagcgccgccaccccctctccgcctgagctccgccggccgccttccttcgtcgttttgccgtcgggcgctcggtgagcatctccccttcaacccctcaccttcctccgctgcctcccggctgtgccgccgcgctagtggtcgccatcggtgaccatcgggccacacgccaccgctccccggccggccggtgggccggttcccgctcgcccgcgaccgcccgattcaccccgggtcgatttgggccgtccacgtgaccctccccgtgccgcccggcgttgctgcccctgtggcgccacgtcggcgccaccttgtcctccccgtccgccgtggccaccacgtggctgccacgtggtgcgcccgcgggtagcacgtgcgtggaccgagtccactgtgcgccgacctcctttgagccaccgacaggtggggcccgctcgtcggcgccacctattcccccccggtgacgtcataaaccattaataattgcgcaataaatcattaataattatagaaattcatttaatggctcaaaaccttctaaaatccatatctaattcattcgaattccgaattgagccgttcaacttgcaaaattcatctaaaattgaactctacatgtttgtttagtttttatgtactgttcccttggtttttattagagtttttcctcgttttgcgtgccggcgtgtagaatccgtcgtttcggaagtccgcggtcgcgaggaaaagagttcggaagatcaaagtgaagaagcaaggcaagtcacacattccccttgagcatattgagcctattttataaatgttttaccgtttgcaaataagtatgcatgttttgttaattacatgggatccgggtattacctatctgctcgcttgtgccatgtttacttgatatctgtcctttgtcaaccgggggtaataaatcgactagctcatgttacttatgtgacctagctagaactatatgcttagccatgcttaattaccactagcttagttgatgggataattacagtattagacatttttagtatcagaatgagctgcgtgctcgagacatctggccatgcttcatggtcgtaattattcaactaaaatgcgactgaatggtgggctgtgggtgcatggttttgctagtcgcacccatggcaattaaggaccggttcgcgggatgccctagaagaacttatcgtacttaccacaagccagcgtgggcaacggctgggcttgtagtatagcttttctctagctgacgcatccagacaagggtgggcgtgatggagtttggatgggccctgcgacggcctatacggcttccggattcacctaggcacgagaggggactgcccgtcgcccgctggggacgggggtgaaacctgaggtgtgatgtgcttggctagagggggttatgcgaagggtcctgtcacggcctctttccggtatgtcgtggtggcatgtcggcgcacggaaacgtgtcgtggggctgtgtcttgtgggtacagttgtacacctctgatcagagtaaaactattcgaatagccgtgcccgcggttatgggcggtcgaccagattcaccgtgattagtctcacacttaataaatcgacccaatgcactgtagttcaggtgggttggttgggcctgttcaacgtggtgtagcgttgatcagtggagatttaatgttactttaattactcaattgttttactgtttgctcaataaaatgttttacagccgcctttatgcaaatagccacaaactgtccttgtgttccccttgcacgtctgcatcgttggtgtggcttgctgagtacggtggttgtactcagccttgctattattcccccttttcagaagtgcagtgcttctgagttgaagacgatgttagaagaccaaggctcagaccccagttgagttttgcctgtggagtggagctgaagccccgctaggatcgcctttttccgctgctgctgctttcgtttcggtgtgaggactaagtgcctcttctgtaagtatttctgtaagtatttgacgctttatttacgtttggaactgtatattacttgtcgttttgtgtaccttggctggtcctggacagggatttaatacacaaaatagtctggaaatttgggctaaatttctgggcgtgacatcggcgaaggacctgctggtagctggctgctctgacggcaactctttctcgatgttcttcgagtagattcacgtcatcacttcgctgctcctcctgatcctcgtcggagtacttctaaactcgtgtgctctgatgtcgtagctccgtggggagcatggcttctgagccatacacgaggaagaagggtgtctccttgttggttgttgtcagcgtggtacgcacggcccataggacagaggggagttcttcgacccacttcttgtcgtgtgacatgagtctgtcgtagacacgggtcttgatcccttgtagtactatgccgtttgccctctcgacctgtccattgctctgagggtgagaaaccgaggcaaagcaaatcttgactcccaatccgatgcagtaatcctggaagtcggcactgatgaactaggagccgttgtctattatgatgcggtgaggcaatccatatctgccgaatatccctttgataaatttgatggcgttgtcggccttaatttcccccgtgggcgttgcttcaatccacttggtgaacttgtcgatcgccacgaataggaacctgtagccgccctgtcctcgtgggaatggtccgagtatgtcgagcccccagcacgagaacggccaggtaagagggatagtctagagcgcctgcgctggtagacttgtgtgtttgctgtggaattcgcaggcttcacaccgctgaaccatgtcacaagcgtctttgagcgcggtcggccagaaaaaccttgtcgaaaagcttttccgactaatgtgcggccggcggcgtgtgacccgcagatcccttcatgtatgtctaggaagagatagttgccgtcgtcgaacgaaatgcatttgagaagtacttcgtttggcgcctttttgtatagatcgttgccgatcatacagtagatcttggcttgtcgagttattttctcggcttctgcgtcgtcctcgggcaactcgtcactattcaggaacttgatgggtggggtccgccagtcgtctgtggtctcgatgtcggcaacggcgcgttctgcctctgtagcccccgagcttatgtcaggggcgactgtgatatcttcgtcgtttgcctctgcgatgccggaggaggagacggcgacgtcggctggctcaccggcgaggaacagtagccgcccggaggaggggaggtactggacgccgacgaggagaccactccggcgagcttcgagcgaggaggaggtgaggccggagacgaggacggcgtcgcggagccaagggacgcgacggcacggccgaccgatgctcaggcgcggcggcacaggcggctggaggcggccggcgcgggggaaagagaagggggacggcggggaggggtggtgaggccacgggagagcgcgggagggggcaaaaactggagaacggatcgagggggttccattttataggatgggggagggagccgggcacgggagaggtgggaacggcggcggataagtcgcccggcggccatggaaagcggccgggattggtgcgggcgttccaggtgattaaaagcacgaatcaagggggaattaagggggaaagagagaggtgggaaaggggattaattccccctaatcaattttggaattagtcatttgaatcgagcggatttgagggaggaattggtgcaagggttaacgggagagagaagaggaggctggcggctggaggttgaagatgcactgtagcatgggggaggcaaagtagactttggaaaatgaccggcccaaaaggaaagaaaaggaggaacgggaaacagcttcggccgagagggaggggctgctgcagctcgggttgcgacgtcgggagagagagaggatggaagggaatgggccaaaaagggcccaatctgaggaggaggatttattttaggttttctttttagtaaactttgataattgttgttgttgcttaataattatttccgttgttctgaaaattcaagtaaaatttgagggctccttttttaccaagaagaattcaataaaaattcttcgggccacatttgaatttttcttgtacgtattttagtgtttgccaatttcttttcgaattttaattaattctattattccatttagagaatgatttttatttcgggatgaatttatcaggacgtgacaaccagggtcagcaccatccgatccagggcttcgcctggacagtgtggattagtctccaatgacggttggagggtatttccgaccattccgtccgtcacaaccatcattgggaggctatatgtaacaccctgaaaattcgaccaacgaaatcaaaactctaaaaatgcggactttcaaaaactttttaaaccaattgcatcatgccgactttattcgcctgtttcattggattttgatgtcggagtctaattaatcgcgaataatgaataactagctaggaacaaaccataaaataaaatctagttgactaaataaataattaaaatataaattaaaataaaggttaggtgggattgaaataaataaaataatatcgcaaccatattagcaataattaaattttagtacgatggaataaccctaattaaaataaattatataaaaataaaatatgagtaatattaatctagggagaattcattagttaagattacatgaatattgagtaaaatgcatatatgtaaaattaggaatcgtggaatcaaatttatatggaaaatacactaaaaccgggataaatgggaaaagtcactgttcatcggccgccaagtgttcgacgtggttcccctagcgctagcccctcctctgccacgccgcctcgcgccccgcgcgccgcgcgccgctccgcctcctctctgtcgccgcccgtcgcgtcgccgctgtcgccgtcgccgtcgacgtcccatcgccgcctcgcgccccgagccgccgcgccgtcaccatcgtcgcctgccgccgcgcatcgtcgcccgcgcctcgagcccgcgcgtcgcccgtcgccaccaccgtgcgccaagccccgcgctacctcgcgccccgagccgcccgtcccatcgccgctcgcccgtcgtctcgccctgtcgccgtcgcgccgcgctaccgtcgcgtcccgccccgagccgcgcgccaccgctgtcgccgccgccgtcaacgtcccgtcgccgcgcgtcccatcgccacctcgcgccccgcgccgccgcgccgctgtcgcgtcgcccctccccttccctttctttccccctcctctcccctataaaactccacccctccccatttctccccactccatctccccatcctctccctcttccccttctccacgcgccgccgttgtcgtgccgttgcgccgccaccttcgaagtcgccgcgccgccgttcccgtgccgccgcgctgtcattcccgtgacgccgcgccgtcgttcccgcgccgccgttcccgtgccgccgtgtcgccgctcccacgccgtcgtgcgccaccgtcgccgctgccgccgccggtgagccgccctcttttccccttgcgtccaccgccgccgctcgggtgagagagagagagagccgagagagaaagggagaggaaaagagaggccggcagagaaaagaagaagagaggagagagaaaaagaaaaagaagagaagaaagtgaaaaggaaaagggaaaagagaaaagaaaagaaaaaaagaaagggagaaaaaggaaaaaggaaataaatagaaattagagggagtttggggaagtttaggaaatttaaaataattagaatttaattatagattaattatagtcgtagaattgcaaaaatgtaatataaattacggattattcttggtaatcgattcgcggtagtattttagatgaaattaataactaaacaaatagacgaattcctatagattattatagagtatttttgggtaaaccctataagtaatcgattcacggtagaaattcggattcaatcgataggaattttagacgtatattatgtttaatcgtttagtcatagactaaattaaatggtataatatttttaggattccgtccgacatttagctcgcgagaagaaatttctaatctaatatatggatataatgctcgggtaaattaaattaaaaacttatgacaacaaaatattatacccgcaaaacagtttaaatcgaaattgggtttgccgtagttcgcggatagtgaagattaataaaagggaatcgactttcgcatgcgacttttatttggatttgtttggatttttatttgaattctaaccgaattcaaatcaattcttgcacgtaactatagagcccgagggagttgcggatccaagcgaaggccaagacccgcaagactttgagcaaggcaagtcatcactattccttgaacatgttgatcccaattgcgaaattattttgtttataaataaaattgcatgcaatgatgaatatcctacttgggattatgccatgccttgattattgtttacccttaaatctttgtaaccatgtctacgtatgagtccctagtcaattatgacaattgcttagaaatgctattctagaatcatgcatactcatatttatcaaatgctatatgcttgggcaattacctttgggaaggtaattgagatgcggcatgtggagacatgagcaccacattgccatgatgttgatgacatgatttgtgaaaggagaaataaaattaaacaaatgttttcgactggggcggctggaggacttgggtggtgtccggtaaaggctagtgccgtccctggtcagttaaggaccgagccatgaagttaaacatgaaacgacctcagtacagccgtacttctcgaatgggtatagacctagcggagtagatagccgagcggaggcagtatccctgcatagtggtttcacttaggtgtgtggacgaacaagcagtctactggcggatacccgatacggatggccaaatggcggatacccgatacggatggctagagactgacttggcaagactacaagactacaaggagatacccaaaaggggacagcatggattgggttcaactacagaatgcgatgttaggcgtgcgtgagttttccccctcgggagcgccagaactcctctcactgctaaaaaccgtgtacgcctagagtgcatgagggcttaagttcatggagcggatactgccaaagtgaggttattgaaaggctttgccgtggcaagtctcattcgttgggacgtaggctcatgtgttgggcaagttgcggagtacgggtaaagtgtacatccactgcagtgtgagtaaaccaaatctattcgaatagccgtgctcgcggttattgagcaccgggacatgtattacacttggctagactctaaattcttaacttgtgtgggatgggatattgcatgatgatttttttttatgctgatggagccacttcctgagaagcgggaaggtggacgtcctcagaaaaccatgacgaatcaatggcgggaagctatccttgggatcacaatggatggtggacagaaccgtcgttgtttaaatacaaactctggtactaaaatttgatcagtcaatgctaggtcttaggctcgtaaaaagaattacaaaacttgctttgcgcaaaagaactatggccatcctttgaactccccctttcatatgcattgttgctgtggtggcttgctgagtacggttggtactcatccttgcaaatataaaatttatcagaagcgggagatgaagcctcggaggatccctatgcctactatcaggagggagatgaagacgatggcgtccagtaggtcttagtacggtcgttgcctgtggcaatggcatgccgctgcctgaattccgctgccttatctatttctgcttttggatgtattccggacctctcggtccgatgatttaagactatgcctgcgggcctatgatgtaataattcgtatcagacactcgtgtatgtgcacttgatatttcagctatgaattcgtgtgtaccaaactacttgatccagggaaatggtactgtttacacgattgattcctgttataaaaacgggggtccacagagctggtatcagagccatacgactgtaggaaaagaccaaaaggcgccccaccccttttctaagttggccaagggagaaattcccatttagtaatactttcaaaaataaaaacgctatgtttacaaaactcggcacaatttttatcttactcttaactattttctttacaaaacaagttttactctcaactgactttgggttttccttaaaattagatggcagattcggattcacccgctacctgggagttgagcttaccccaatcggagggttatgttattgagctgcatcggatgttgaggcgtctgcgataccctggttttccgtcataccgagtgaggcagtgtggcccagtttgggaggctcgggtcgagattcacccccgagtcccttccgagttagactacagcttccagacacgtcaccaccgagacctgccagagacagcgatgcaggatgccgcccgggaggccttcctccgactcagctctatccaccgagctgagttagtgagtaccgagtttgctcatcacccgttccgggaggagggcaactcagtttgcacagttcaggacacgccctgctgctacaacccgatggtgactcggttgtcacgatgggctgaggcagtagatgacttctacgaggaggctctgttggagattgacgaccaccagagacgtatggaggagttagagactgaggtgaccgacctcacagcacagcagcttcagttggaggaggagcaccaggcttggggcagtgagatagactcactgaaggcacagctccaggtccacggcgaccagttccagcagttatctgaccagtacaacgatcgccgcgggatgatggatactcttgaggagcagctgagagagagtcaggagcacgtcagccagctggaggagcagcttcgagcagccaagatcagcaccacaggggcctctacttccacagcagtaggccgtgaccgctacttcttcctcaccccgccgtacccaccggcgttccacgctcttctgggagaggctagtatgctagctaccgagtcagcgccctacctagtggaccctacagcagcacagccacctgttccggagttggtgcacactccactgatccctacaccttctccgcagctgggttccggtttggagactccgatccagatcgactccgagacggaggggaccgacaccgagccggagatcgagccagacatcactgatccttcagaggatgaggctcctgctccccgcatcaccttccttggaggacctcgcaccctcagcactgctcgcaagagcacacgacccccgggcaatgtcgcgaccgggaaaattgccttttcccgaacgctagtgtattaatccccgtcccaggaaaagccggggtacaccacacaaacatgatataaaagacacatctttattatatcgataatatttacattattacaaaggcacttaaggcctgacaatcaaaaataaacggcagcggactagcgggcctacggctccatcttcacaggcgctcaactggggtataagccaggactccacctaagacatcttctccaaagcttctcttactgaagggggaaaagattgagcaagaatgagtacaaccacagtattcagcaagccacaccggcagatgcatgattaatgcaagggggtacaaggggataatagtaggggttaggttttgcagtaaacagcatttaaaagtcacttagttgcccaaagccattttgtaaagacgatcctagagctacacagtattattaaacaaggccgtgaaccctcacgaacctgccttaacccaaggcctacgatgatttggaccgaactggcaacccgacctgggttccagctcgtcccaagccaacccaggccaaccattccatattttagttgtggagcaaattttaagaattaaaacactaacttgggtacattgctaggcttgcccatatccgagggctcggctattcgaatagatttactctgatcagaggtgtacatctttacccacaagacacatctttactccgcattccatggccttggaacccgtcgtaaagatgtgacatagtttccaacccatcctagccttagacaagagtaccgacccaatcctacctacggccgggatacccgggacaggcaggcagaactgagcccctagcattgggcaccaaccctccgccgtacgacatctcgactaccgggccgcagctcgtgtagccttcatttgccctggagaatgtccatcgacgcccgacttcatccatctccaatccgtgtacttttgtttatgactagactgagccacaaactaagccttacccattagacatgtggaagtacggtagtgctttgcaacagaggcccgagctttagtccttatagtggccggggtgctacttcccataactggcatgcacccaaaccccaccgaaaacaggttttaggggttttgaaagaggaagagaggtgtttgtccaattccaacataagccaaccattccaaagtgtccaaatgatatgagaattcccaaagtctaaagttataaaaccacctaatgttgcctaattaatcagcgaagcatctacctaaattcatactagtggaaccatgaatagagtacccactagttgaggttttgtttaatctagggtgaacaaggtaataataataacaataacaataataatatggtcataacaaaggtaaataagcatggctaaataaaacagtggtaacgcgggaatttaaataaagcgataatgcaataatttaaatcaacataattttataaaatgggattcaatatgctcaaggatgatgtgacttgccttgctcagaaagaacggccttccgaacctttggcgacgaccacgaaccacgcttcgggaacctccggaacgacgaaagctacgcgaagcacacaagcaaagctacaagcctataaagaagcaataacaatacataaaaacaaagcacagggttctttaggttataacaaacattaggagacttgaacgggtcgattcagagttcgtatgaccgagatatgatcatccgaagtttaatgctgttatatggagatttgcggattattataattaagctttgcaattataaaacatgtgtaagcgctggcctggaaaagacaggaaggctgcgccgttgacatgcggaccccacatgtcaacctaaaggaccgcggtagaccgagtacacagaggcggtccacggtcgacggaagcggatcccgtgtgtcaaccgaggcgagtggccgacaaacggactccactagacaccacacggtcactacccgcacacgtgaacgaccaccgacaccggtacacgggtaccggggccgacaaccgcacaacgggcacgggcgacaccgaaaggacgaggacagggcagcgagggagagggaaccttaccaccacgcgacgaggcgtgggaacgacaacgacgaacgggcgcggcggagacagacgggcacaacggagacgaacggcgaggggacggcttcggcggcgatccttggacgaaggcgagacgcggccggcacgaggcttgacgacgcggagccgaggacaaagacgaggacggggctgcagcggctcgcttgacgaacgcggacgacggacgagaacggctcgacggagggacgaacgccacgacgaccggaaacgacgagaggacgacgacggcgacgaccggggccggcgaggaggcgacgaggacagccggcagcggctgcacggggacgaggatgacgtggaacacgccgctgcgatgacgatgacggaggcggcgccgcgagacgacgagccgggcgagagggaacggtgaagacgacgacgggcaccggcggtgttcggtcggaggggaggcgaggccgaggacgacgtcgcagctgcgatgccgaagatgatgggggtgtggccgaccggtgcacggcgaggagggacgggcggccgaacaactccggcgaggcggacggagaggttcgcggcgacgttccggcgaaaccgagggcaggccggggtggagggcgatgcggcgtcgccgagggaggagacggcgacgtcggccgacgctctggcgcggcgaccggggcagccggaggagatgtcgacgaggaggaaggtgaggccggcgcgggcgacggtgttccggcgatgttcgggcgaggaggaggtgatgccggggatgagagcggcgtcgtggagccgaggaaggtggtggcgacgtcggccggcgctccggggacgcggcagaggcggccggaggcgaaatcgtggcggcaacaccactggacgccggcgaggacgcgtctccggtgctttacccgcgaaacggagggctgaccgagggagagggggcagctgcgaggccgagggagaagacggcgcggccgggcggcgctcgggcgaggagaggaaggcggctggaggtggccggcgcgaaggaaggaggagggcgacggcgggaacgtagttccgggggtctcctcgcgaaacggagggcaggccggcgtggaggaggtggcggcgacgctggaggaggcgatggcgcggccggccggcgcacgggcgaggcggcacaggcggctggaggtcgccggcggtgtgggagagagagggcgacggcggggatggggctagagaccacggggaggctcgggatggggttaaaacgagagaacgcacggagggggttgcattttataggatgggggagggagccgggcacgggagagggcggaacggcgacgggaatggcggccggcggcaatggagggcggccgaggaagacgcgggcgttcccggcgattgggggcgccattcaagggggaaattagggggaattgaagaggagtcaatggggattaaaaccccccaattaatttcggaatccatggtttgatttgcgcggatttggaggaggaattcgcacgggagggagagaaggccgtgcgggaggaggaagaaggcgacggcgccctggcgcgtgggccccaccggtcaggcggcggcgtcagcgcgcgcacgcgcgcggcacgtgcgggaggggagcggctcgggggctggggcggcttgggccgagcggccggcccaagaggagaggaggggaggcggcatgggccgagcaggccgggagggaagagggggggggaaaaggcagcccgagagagagagggaggagggagtgggccgagagggggagaggcccaagaggaggagggagagaaggagagggagagaaagagagggaggactttgggccaaatttggcccaaaagaaagaagaggattatttttagatttttctttttaataaactttgacaattgttgttgttgtttaataaatatttccggtgctctgaaaattcaagtaaaatttgagggctcattttagaccaaggagaatttaacaaaaattctccgggccacattcgaatttttcttgcacgtattttagtgtttgccgatttcttttcgaattttaattaattctattattccttttagcgaatgaatttttaattttgggatgaatttatcaggacgtgacaaatccaccctccttacaagaatctcgtccccgagattcgaggaggctagcaagaagataggttgggcggtcttctcttattgtctgacttcttccgctccgtcttctataacaaacttgcctaacaaaacttcttcactctggactgcttggctcgatctcctgttgcagatggaatcttctcttcacctgacttgtccctggttgaacctttagctgacttcgactgggttgcggcacttgaagatggggcttcagttccagaactttgcatagttcatatctttggagtcaacctcatacaagttacccacttcatgtcatgcgtcgagatcagctcgtcattactaagataccatgcttgtcatcatttagcattcaaagtattcctttacacattcagccctgacgtattctttttagatttctcttatcaatcacctttcgacctacttctttgcctggtaataaacatctttttcgatatcttctatcagtcatcttttgacctctggagaaacttctcttgtttgtcttcatccgtttccacatcttctggtgcatagtgagccaaacgatagaactcgtgccggtactctgtgacggtcaaatctccttgcttcaggtagcgaaactctcgttttcttagtgtgatcattcctgcgggaacatgtgatctcctgaatacagaggaaaactcgttccaggtgatggtatgtccttctggccgtgatgcctcgtagctatcccaccactctgaagccggtccaaccaactgatgagttgcgaagccaacccgctcctggtcggtgcactgaatcacccctagcttcttctcgactgtgcgcaaccaatcattggcttccataggatcgacggccatggcaaaggttggaggccccgttttgagaaattctgataacttgcactgttgctggactgtaggtacttgaacgttggttgcccctgctgggttgttccgattctgtaatagttgaaaggcggttgccaacatgttggtttggttaaccacaacttggattagctctggtgaggtttcgttgatgcttctctcattcccattggcttgggttcttgagtcatcggatccatcattcccatagcctttgttaccaatgttatccatctgtcacaaggtagaggttgagaggggaagcatacaaggaaagaatagaccagagctagggacaggaccttaaaggaactaactctttttgttgatgtgttgtttgtttcatttattctgcaagttgattaagcaaacaacctagcatggttacatcaccacccaccgatgcaaaccacgcgctacacacacaagcaaggaaacacacgacaaacgaaacactagagggtggcttaggttctgcgacgggttctccaagatcttcactcctgcttcacagctggcttcactgcttccttcgcttcgctggcggatcctgcagtcttccggagcttcggcaaacaactgacgacatcttcttcttcgcaaagctgaccatctagtacttagttgaaatccgaagaaagaaaagagtaaaccttttgcaaatagcattaggggaaggagaaaaagaggaactttcgcaaataattttatttataaaatatgtccttaggttttatccatttggcttatcctacagtcgagatggctctgataccagcttgtcgcgaccgggaaaattgccttttcccgaacgctagtgtattaatccccgtcccaggaaaagccggggtacaccacacaaacatgatataaaagacacatctttattatatcgataatatttacattattacaaaggcacttaaggcctgacaatcaaaaataaacggcagcggactagcgggcctacggctccatcttcacaggcgctcaactggggtataagccaggactccacctaagacatcttctccaaagcttctcttactgaagggggaaaagattgagcaagaatgagtacaaccacagtactcagcaagccacaccggcagatgcatgattaatgcaagggggtacaaggggataatagtaggggttaggttttgcagtaaacagcatttaaaagtcacttagttgcccaaagccattttgtaaagacgatcctagagctacacagtattattaaacaaggccgtgaaccctcacgaacctgccttaacccaaggcctacgatgatttggaccgaactggcaacccgacctgggttccagctcgtcccaagccaacccaggccaaccattccatattttagttgtggagcaaattttaagaattaaaacactgacttgggtacattgctaggcttgcccatatccgagggctcggctattcgaatagatttactctgatcagaggtgtacatctttacccacaagacacatctttactccgcattccatggccttggaacccgtcgtaaagatgtgacatagtttccaacccatcctagccttagacaagagtaccgacccaatcctacctacggccgggatacccgggacaggcaggcagaactgagcccctagcattgggcaccaaccctccgccgtacgacatctcgactaccgggccgcagctcgtgtagccttcatttgccctggagaatgtccatcgacgcccgacttcatccatctccaatccgtgtacttttgtttatgactagactgagccacaaactaagccttacccattagacatgtggaagtacggtagtgctttgcaacagaggcccgagctttagtccttatagtggccggggtgctacttcccacaactggcatgcacccaaaccccaccgaaaacaggttttaggggttttgaaagaggaagagaggtgtttgtccaattccaacataagccaaccattccaaagtgtccaaatgatatgagaattcccaaagtctaaagttataaaaccacctaatgttgcctaattaatcagcgaagcatctacctaaattcatactagtggaaccatgaatagagtacccactagttgaggttttgtttaatctagggtgaacaaggtaataataataacaataacaataataatatggtcataacaaaggtaaataagcatggctaaataaaacagtggtaacgcgggaatttaaataaagcgataatgcaataatttaaatcaacataattttataaaatgggattcaatatgctcaaggatgatgtgacttgccttgctcagaaagaacggccttccgaacctttggcgacgaccacgaaccacgcttcgggaacctccggaacgacgaaagctacgcgaagcacacaagcaaagctacaagcctataaagaagcaataacaatacataaaaacaaagcacagggttctttaggttataacaaacattaggagacttgaacgggtcgattcagagttcgtatgaccgagatatgatcatccgaagtttaatgctgttatatggagatttgcggattattataattaagctttgcaattataaaacatgtgtaagcgctggcctggaaaagacaggaaggctgcgccgttgacatgcggaccccacatgtcaacctaaaggaccgcggtagaccgagtacacagaggcggtccacggtcgacggaagcggatcccgtgtgtcaaccgaggcgagtggccgacaaacggactccactagacaccacacggtcactacccgcacacgtgaacgaccaccgacaccggtacacgggtaccggggccgacaaccgcacaacgggcacgggcgacaccgaaaggacgaggacagggcagcgagggagagggaaccttaccaccacgcgacgaggcgtgggaacgacaacgacgaacgggcgcggcggagacagacgggcacaacggagacgaacggcgaggggacggcttcggcggcgatccttggacgaaggcgagacgcggccggcacgaggcttgacgacgcggagccgaggacaaagacgaggacggggctgcagcggctcgcttgacgaacgcggacgacggacgagaacggctcgacggagggacgaacgccacgacgaccggaaacgacgagaggacgacgacggcgacgaccggggccggcgaggaggcgacgaggacagccggcagcggctgcacggggacgaggatgacgtggaacacgccgctgcgatgacgatgacggaggcggcgccgcgagacgacgagccgggcgagagggaacggtgaagacgacgacgggcaccggcggtgttcggtcggaggggaggcgaggccgaggacgacgtcgcagctgcgatgccgaagatgatgggggtgtggccgaccggtgcacggcgaggagggacgggcggccgaacaactccggcgaggcggacggagaggttcgcggcgacgttccggcgaaaccgagggcaggccggggtggagggcgatgcggcgtcgccgagggaggagacggcgacgtcggccgacgctctggcgcggcgaccggggcagccggaggagatgtcgacgaggaggaaggtgaggccggcgcgggcgacggtgttccggcgatgttcgggcgaggaggaggtgatgccggggatgagagcggcgtcgtggagccgaggaaggtggtggcgacgtcggccggcgctccggggacgcggcagaggcggccggaggcgaaatcgtggcggcaacaccactggacgccggcgaggacgcgtctccggtgctttacccgcgaaacggagggctgaccgagggagagggggcagctgcgaggccgagggagaagacggcgcggccgggcggcgctcgggcgaggagaggaaggcggctggaggtggccggcgcgaaggaaggaggagggcgacggcgggaacgtagttccgggggtctcctcgcgaaacggagggcaggccggcgtggaggaggtggcggcgacgctggaggaggcgatggcgcggccggccggcgcacgggcgaggcggcacaggcggctggaggtcgccggcggtgtgggagagagagggcgacggcggggatggggctagagaccacggggaggctcgggatggggttaaaacgagagaacgcacggagggggttgcattttataggatgggggagggagccgggcacgggagagggcggaacggcgacgggaatggcggccggcggcaatggagggcggccgaggaagacgcgggcgttcccggcgattgggggcgccattcaagggggaaattagggggaattgaagaggagtcaatggggattaaaaccccccaattaatttcggaatccatggtttgatttgcgcggatttggaggaggaattcgcacgggagggagagaaggccgtgcgggaggaggaagaaggcgacggcgccctggcgcgtgggccccaccggtcaggcggcggcgtcagcgcgcgcacgcgcgcggcacgtgcgggaggggagcggctcgggggctggggcggcttgggccgagcggccggcccaagaggagaggaggggaggcggcatgggccgagcaggccgggagggaagagggggggggaaaaggcagcccgagagagagagggaggagggagtgggccgagagggggagaggcccaagaggaggagggagagaaggagagggagagaaagagagggaggactttgggccaaatttggcccaaaagaaagaagaggattatttttagatttttctttttaataaactttgacaattgttgttgttgtttaataaatatttccggtgctctgaaaattcaagtaaaatttgagggctcattttagaccaaggagaatttaacaaaaattctccgggccacattcgaatttttcttgcacgtattttagtgtttgccgatttcttttcgaattttaattaattctattattccttttagcgaatgaatttttaattttgggatgaatttatcaggacgtgacaggcaagaggcctaagccagatccagaggccactacctctgagccgtggggactccggtttgcgcgagccagcgactaccctctacctgccccgggatcctgcggatggctggaggattagactgacggactccttgcagcttcgatctcgtatcagatggtttttggatagtatgcgagacacccccttcccttacctagattgacgagtagtttgatgattggtttgatgtatcgtttggatgaaccttatttggactgcgtatgtatgcagtcaattgcatcatgatttatgtaccatttgtgaaactctgtgatgttatctatgatatctattgttgttgtgttgtaaatgagtttattccaccatgcttgcgaaacaaagtcatatcgacacaactcccttaatgggataaagccataggagctagttagaaaattaggatgcttactccatcaacctacacagatggcaagccgacgtcgggcaacaaccagcaatgacgaaactcagacacccgacttaaacactctggccggaattatggccacccaaactcaacttctgcaagctatcgcgagcaaccaaggcaaccgcggagggtcaagctttggagagtttatgaggaccaagccgcccacgttcgctacggccgatgagcccatggaagcagaagactggctacgcatcatagaaaagaaactgactctagtcagggtacgcgaagccgacaaggtgatcttcgcagtgaaccagctggaaggacccgctggtgattggtgggatacctacaaggaggcccgagaagacggtgctggagaacccacctgggaggagttcactgcagcgtttcgcgagaatttcgtacctactgcagtgatgcgcatgaagaagaacgagtttagaagactgcggcaagggaatacaacggtgcaggagtatctaaacaagttcactcagttggctcgctacgcaattggagacctggcggatgaagaagaaaagatcgacaagttcatagaagggctgaatgatgaattgcgtggacctatgatcgggcaggatcacgagagtttccagagcctgatcaacaaggtcgtcaggctagagaacgatcaaaggacggtggaacacaaccgcaagaggaggcttgctatgagtcgcccacctcagacaatgcctcagcgacttaagggagccactccgtccggatggaagccccctgtcatggtgaccaaccgtcccgctgcacttagcaacttcaacaggccagttgcacttcagaaccgcacccctacaccaactttggctgcccctggggccaagaagaatgtggactgcttcaactgtgggaaatacgggcactacgctaacaactgccctcatccacgcaaaacccctgtccgaactggcgcgaacgcaatgactgttcgcggcactactacccctgctgtcgggcgaggcctattcaagactccgcaaccgaacaggaccaccactggatttgggcgcgggcaagtgaaccatgttcgagctgaagaggcccaggaagatcaaggcgtactgatgggtatgttttcactcaactccactccaattaaagttctcttcgattcaggagcattgcattcatttatatctttgaaagcaagtcaacaacacaatttaaccagagttaaattaagacaaccaatgttagtacattcgcctgggggtgagatagcagtggatacagcttgcattgacgtacccatccgccttagggatgtggtatttccctccaatcttatggtgctaataccccaaactcttgatgtcattttgggtatggattggttagcaaagcatagaggagtaattgactgtagacgtagagaagttaccctgaccacaccctggggatcggatatgagagcaaccatggatcaagatcctaggctaaccgaacgtgccggaggtatatttaccatgctacccctaaagggaatgccagtagtgcagcgatttcctgatgtgttcccagaagatttacctggaatgccaccagatcgtgacatagagttcattattgacctgatacccggaactgcccccatatccaagagaccatatcggatgccggtcaatgagttagaagaacttaaaaagcaaattagggagttgcaagagaagggatttgtacgccccagttcgtcaccttggggagccccagtgttatttgttaaaaagaaagacggtagcatgagaatgtgtgtagactaccgatcactgaacgaagtgactatcaaaaataagtatcccctaccacggattgatgacctcttcgaccaacttaagggagctaaggtgttttcaaagatagaccttcgatcaggataccaccaactgaagattaggaccgaggatatccccaaaaccgcgttttcaacacgctatgggttgtatgaattcacagtaatgtcgtttggtctaaccaatgccccagcatacttcatgaatcttatgaacaaagtattcatggattacttggataagtttgtggtggtattcattgatgacattctaatctactccaaagatgaggaagaacatgcggaacacttaagattggttctccagaaactccgaaagcacaagttatacgcaaaattcagcaagtgcgaattttggttgaaggaagtcgcttttctgggtcacgtaatctcagccggtggagtagcagtggaccctgctaaagtggaggctgtcacggaatggaaagcacccaaatcggtgactgaaatccggagttttctaggcttggctggatactaccgaaggttcattgaagggttctctaagatagcccgaccaatgacacaattactcaagaaggaaaagaagtttgcatggtcggaacagtgtcaaggaagctttgagcagctcaaagaaaagctgacctcagcacctattttagttcttcccgacatcaggaaagactttgttgtatattgtgatgcgtcgaggcaaggactaggaggtgtactgatgcaggagggaaaagtggtggcctatgcgtcgcgacaattgcgaccacatgaggaaaactaccctacccatgacctagaactcgcagctgtggttcatgcactaaagatttggagacattatctgattggaaaccattgcgatatctacactgaccacaagagtctaaagtatatcttcacccagtcagatctcaacttgaggcaaaggcgatggttagaattaatcaaggactatgatttagaggttcattatcacccaggcaaagcaaacgtcgtagccgacgctctgagtcgtaagagccattgcaatcatctgagaacggaagggatggtccctgagcttagggaggaaatggcgcagctgaacctacatatagtaccccatggacagataaacaccctggatattcaacctcttttgagaacccaaatagaagaagcccagaaggacaatgaggaagtccgagaggtgaaggaacgcttagctgccggacgtgcaaaggaattttcaaccgacgaaaaagatgttctatggtataaaaagagaatttacgtacccgaacagggtggactgaggggattaattttaaaggaagctcacgaatcggcatattcattgcaccccggaagtacgaagatgtaccaagatctgaaggaaggatactggtggcccaacatgaagagagatgtggccgaatacgtagcactctgcgacgtatgccagaaggtgaaggctgaacaccagaggccggcaggtttgttgcaacctctcaggattcccgaatggaaatgggatgagataggtatggatttcattgttggattgcccaagaccgcaacaggatatgattccatttgggtaatcgtggatcgactcaccaagacggcgagattcattcccgttaagacaaattatagcagtgcaaaactcgccgagttgtatatgaccaggatagtgtgtcttcatggtatacctaagaagattatatctgatcgaggcacacagtttacctcacatttctgggagaaagtccatgaagccctgggaagttacctcgcatttagcaccgcttatcatccacagacagatggccagacggagagaaccaaccaggtcctggaggacatgctgagggcttgtgctctggattttagcaaggactgggagaggtgtttgccctacgccgaattctcttacaacaacagctttcaagcaagcctaaagatgtcacccaatgaggcattgtttggtcgacgatgtcgtaccccgctaatgtggtccgagactggagaacgggcggtatttggacctgacattattcaagaagccgaagaaaaggttcgcttgatccgtgatcgtctaaaagtagcacaatcacgacaaaagagttacgccgacactcgaagaagaaacctggaatttaaggaaggagattacgtttatctaaaggtttctccgatgaggggaacaaaaaggtttaaggttaaaggaaaactggcaccaagatatgtggggccattccagatcatcgccaggcgaggagaagtcgcatatcagttacagctaccagaatatatcgccgatgtgcacccagtcttccatgtgtcccaattaaagaaatgcttacgagtgccggaagaacaagccccgctggaagagattcacattagcaatgatctcacatatccagaacacccgatccggatattggatgaagcagaaaagaggactaggagcaaagtgtggcgtatgtacaaggtacaatggagtaatcacactgaggacgaagccacctgggaaggcgaagaattcttgaggacggagtacccgcatctattcggcaactggtaagaaaatctcgggacgagatttatttaaggggggtaggtttgtaacaccctgaaaattcgaccaacgaaatcaaaactctaaaaatgcggactttcaaaaactttttaaaccaattgcatcatgccgactttattcgcctgtttcattggattttgatgtcggagtctaattaatcgcgaataatgaataactagctaggaacaaaccataaaataaaatctagttgactaaataaataattaaaatataaattaaaataaaggttaggtgggattgaaataaataaaataatatcgcaaccatattagcaataattaaattttagtacgatggaataaccctaattaaaataaattatataaaaataaaatatgagtaatattaatctagggagaattcattagttaagattacatgaatattgagtaaaatgcatatatgtaaaattaggaatcgtggaatcaaatttatatggaaaatacactaaaaccgggataaatgggaaaagtcactgttcatcggccgccaagtgttcgacgtggttcccctagcgctagcccctcctctgccacgccgcctcgcgcaccgcgcgccgcgcgccgctccgcctcctctctgtcgccgcccgtcgcgtcgccgctgtcgccgtcgccgtcgacgtcccatcgccgcctcgcgccccgagccgccgcgccgtcaccatcgtcgcctgccgccgcgcatcgtcgcccacgcctcgagcccgcgcgtcgcccgtcgccaccaccgtgcgccaagccccgcgctacctcgcgccccgagccgcccgtcccatcgccgctcgcccgtcgtctcgccctgtcgccgtcgcgccgcgctaccgtcgcgtcccgccccgagccgcgcgccaccgctgtcgccgccgccgtcaacgtcccgtcgccgcgcgtcccatcgccacctcgcgccccgcgccgccgcgccgctgtcgcgtcgcccctccccttccctttctttccccctcctctcccctataaaactccacccctccccatttctccccactccatctccccatcctctccctcttccccttctccacgcgccgccgttctcgtgccgttgcgccgccaccttcgaagtcgccgcgccgccgttcccgtgccgccgcgctgtcattcccgtgacgccgcgccgtcgttcccgcgccgccgttcccgtgccgccgtgtcgccgctcccacgccgtcgtgcgccaccgtcgccgccgccgtcgtcgccgctgccgccgccggtgagccgccctcttttccccttgcgtccaccgccgccgctcgggtgagagagagagagagccgagagagaaagggagaggaaaagagaggccggcagagaaaagaagaagagaggagagagaaaaagaaaaagaagagaagaaagtgaaaaggaaaagggaaaagagaaaagaaaagaaaaaaggaaagggagaaaaaggaaaaaggaaataaatagaaattagagggagtttggggaagtttaggaaatttaaaataattagaatttaattatagattaattatagtcgtagaattgcaaaaatgtaatataaattacggattattcttggtaatcgattcgcggtagtattttagatgaaattaataactaaacaaatagacgaattcctatagattattatagagtatttttgggtaaaccctataagtaatcgattcacggtagaaattcggattcaatcgataggaattttagacgtatattatgtttaatcgtttagtcatagactaaattaaatggtataatatttttaggattccgtccgacatttagctcgcgagaagaaatttctaatctaatatatggatataatgctcgggtaaattaaattaaaaacttatgacaacaaaatattatacccgcaaaacagtttaaatcgaaattgggtttgccgtagttcgcggatagtgaagattaataaaagggaatcgactttcgcatgcgacttttatttggatttgtttggatttttatttgaattctaaccgaattcaaatcaattcttgcacgtaactatagagcccgagggagttgcggatccaagcgaaggccaagacccgcaagactttgagcaaggcaagtcatcactattccttgaacatgttgatcccaattgcgaaattattttgtttataaataaaattgcatgcaatgatgaatatcctacttgggattatgccatgccttgattattgtttacccttaaatctttgtaaccatgtctacgtatgagtccctagtcaattatgacaattgcttagaaatgctattctagaatcatgcatactcatatttatcaaatgctatatgcttgggcaattacctttgggaaggtaattgagatgcggcatgtggagacatgagcaccacattgccatgatgttgatgacatgatttgtgaaaggagaaataaaattaaacaaatgttttcgactggggcggctggaggacttgggtggtgtccggtaaaggctagtgccgtccctggtcagttaaggaccgagccataaagttaaacatgaaacgacctcagtacagccgtacttctcgaatgggtatagacctagcggagtagatagccgagcggaggcagtatccctgcatagtggtttcacttaggtgtgtggacgaacaagcagtctactggcggatacccgatacggatggccaaatggcggatacccgatacggatggctagagactgacttggcaagactacaagactacaaggagatacccaaaaggggacagcatggattgggttcaactacagaatgcgatgttaggcgtgcgtgagttttccccctcgggagcgccagaactcctctcactgctagaaaccgtgtacgcctagagtgcatgagggcttaagttcatggagcggatactgccaaagtgaggttattgaaaggctttgccgtggcaagtctcattcgttgggacgtaggctcatgtgttgggcaagttgcggagtacgggtaaagtgtacatccactgcagtgtgagtaaaccaaatctattcgaatagccgtgctcgcggttattgagcaccgggacatgtattacacttggctagactctaaattcttaacttgtgtgggatgggatattgcatgatgatttttttttatgctgatggagccacttcctgagaagcgggaaggtggacgtcctcagaaaaccatgacgaatcaatggcgggaagctatccttgggatcacaatggatggtggacagaaccgtcgttgtttaaatacaaactctggtactaaaatttgatcagtcaatgctaggtcttaggctcgtaaaaagaattacaaaacttgctttgcgcaaaagaactatggccatcctttgaactccccctttcatatgcattgttgctgtggtggcttgctgagtacggttggtactcatccttgcaaatataaaatttatcagaagcgggagatgaagcctcggaggatccctatgcctactatcaggagggagatgaagacgatggcgtccagtaggtcttagtacggtcgttgcctgtggcaatggcatgccgctgcctgaattccgctgccttatctatttctgcttttggatgtattccggacctctcggtccgatgatttaagactatgcctgcgggcctatgatgtaataattcgtatcagacactcgtgtatgtgcacttgatatttcagctatgaattcgtgtgtaccaaactacttgatccagggaaatggtactgtttacacgattgattcctgttataaaaacgagggtccacactataaaaggagttgccattctcacttcactcacacacctcaagcaaagctctctcatattctctcaagtttagtttagtgcttttaagctagtggaataggaatagaatataaatcggagtccggaagctttcggaagagttcgggtatagctctagtagctcttctcttctcttttgtaagctttgtactttatttcgaatactcttctttatacatttatggtattgaaatactttccaagtatatgaatgccaactttacattatgttcatgttatactgattatactgctagcttatctgggagatgcatcggtacggatttagtgtttgtttatgcaactaatctatgtcatgacgatgatatttgagtagtatctggtagtttaggcgtggtgtctagattacgggatatcattatttggggttatatgatatggatgagaggtgggccgctgatggtgacaactcagtacgggtattcctccgctcgtgtatacagtcctaagttaatttcctggggagggtactcatccgtatttagccccagttgtatggtcatgacgggttgttgtaaggaacttggcaatcagggctggcttctcgaagtaccaggagggcttcggatagagggtattaggtaatatgtcagataactagaatgtatgtatactatatatactagaagtataggaatagatttcatttatcttctctttccacttagcttagataatttaatatgataatgagtagctccctgcttgtgtgtcattctacccttggattatcttaacccctgcttagactatgattattaccagtaacatataaattattagtcaggttgtctctactatgatcttcccacgggattaaataaatacgatgtccttcgaatactctcgggtgaaatgatacaatggtatatccgtgcgcttgcgaatgaactctgtaaccataatataccaggagtatttctgcgccattgctgggagttatatttctagtaatgtctgtccggtgacattgtcgagctagggttgacgatgacggggcctagacgagagcggcgggcttgggatcggatgacggcgaccttcacctgcatgctccactcaggttttctgcgccgcctctaccgccgagcggcgtcgggcgccgcttcagcggatctggcatggcacggttgctggcggggcgacgatgggcgactgtgggcaggaggcgtggcagctccacctctaccgccgactggcggcgggtgcgatatcggcggatccggcttggcatggctgcgggggtggtggtgactggcgactgctgacggaaggtgaggaggctgcgcatccggacaccgctcaacgccccacgcgcgcggatcttagccactaaggtggggcgtatccggcgtggatacgggcggtgcgacgttggatccgatgcggatcctgcacgggtgacggagggcgtggctgtgattgctgactgcgggcaggaggcgaggcggcagcggatccggccgccgctccacccccacgcgcacagcgcgacctccgccgcggcaagcttggactcgaatggatatggaggagcagcggcggccacctccacgatgcgccgccgtcgatgtccggagcaagcgccaacaaaaatttaacttatgcttaaattttgttgagtaaaaattttgttgtcatatcaagttaattttttactcagtaaggataccaagcatacgatgtatatgaaaaagggtttcaaatgaatacgtagcactggttttattaagtggaattatcgcacgaaaaaatcccctgttttcggcacctcatctaactgttttttctattaacgccgaatcactaatccctatgatcacgcatattttttcttaaactaaaagttatttttttaactacgtatttcagacatcatataggtgtttttaaaacaataagttatttttaactattaaatccaacaataataacataacataaatttcttaatttagtttttaactacaattagaaaatcttacatctacaagttaaattttaactacatatgtagtccccgtacaagtttttgtacaacattatgaatttttagtaataaaacaaatgtttttaacgtcagttattatcacatcgattcaaagttaatagttaactcatccattttttgagtttacgtagctccaagatagataactcacgttgtaaagttaaattttaactccacaacgatgtcatctcaacccacacccaattgtatctaagttaaattttaactccacacgaaggttggttgcctcggtggtgggggaaatggtgaggagcgcttcgtagcgccaccgatgactattattttaacatttctgacttaattagagagagaaatttagaaccttatgccaaattatatggccttaacccacttatattttcgttccaagttgcaaagatcaaaataaaaaataacatggaaaaaataatttaaaactgaacatttttttctaagtgtaacattgtttttggatttgacccattctaaatagcaaagttcaaacattttaagagtaaaatatttaaaatttcaaataaaatctaacagaaaattgatttttccggcattattttggaaataaagtctaacataatttcaattcaaagtgtatagccctaaactacagagagcagtaaaagtctccttttctaagatgctctgattcagcaaaaatatttactaatgcaatactacgtccttacaactaaatcaatagttcaacatatctatctcatttaattatatgatgtagtaatttagaaaatatcttcaattaatatatagtatacaagaaaaaaatgttagttacagtttagaagctcgaaaaacaagatattagtacaaatgatctatagtttcataggtagcaactccattaggaaaaaaaatattagtagcattcaaataaatcccaaataaattatctagaaaaaatttaataaagtaagataaacattcataataaaaatccaaacaaattaaataagatgtccacacatgtgacgggctaccttcctagttagacaaattcataaaaaattctgagaaaaaaaataaaacatccaactattaatgtttattaaatttggtgacccactatttatgaccattagatttatcttcgaaacaataaattctctctcaaacccaggcccaccagggcttttacgtacgtacattactcacatttgtcagctctctgctcttccctcaattttttcctcctattttctacctattccttctcttattttttcttgctttattagtttttattagttacgaaaaataaaaattgtgttaaacaattaagttataatatctaaatcatagaacttagatcatagaattttttttgtccacttatatctttaaattatttacgacaaaaattcactataattcaactttgaaaacaaattttattttggtttatatcttctaacctttgcataccattcaagcaattataaaaaatatgaaataaagtaacaatatactccctccgtatcagaatataagaagttttagagttagacacggttattaagaaagtaggtagaaatgaatggtggagggttatgactggatgagtagtggaggtaggtgggaaaagtgaatggtggagagttgtgataggttgggaagagaaatgttggtggagaagttgttatattttgggataaatcctgagagctaaaagttgttatattttgggacggagggagtataatttatcatcatacataacttcatagtaattaaataagatctgcaatcataaaaagtaatgttcccaaaatatgttactccctccatcccataatataagggattttgactttttgtttacactgtttaaccattcattttattaaaaaaaaattggaattattatttattttatttgtgacttactttataattcaaagtactttaagtacaactttttattttttatatttgtgtcttttttttaaataagacgactaatcaaacagtgcaagcaagaagtcaaaagtccgttgtattatgggaccgagggagtagaaagcaaaagttatgctaaaaagtaagcaactacaacatctaaatcaaaaactaatatttgatccccttatatttttagattagtttacatttaaagacacatatgcacagtaattcaactttgaaaagaaatatgtcattttacggttgtattttctgatttctgcattattaaacaaaacgatgatatagattttatcagcatatataacttcacaaaaactaaaatgaacctaattccaattaatgtttttaaaataatactcccccatctaacattctaataactcaaaataatattatttgatttgtaatgttcatatttttactatctactatgaataagaagctatgggaaaagacgaataaaaacgataaattttaatcaatcaataaagcttctattctatatttagttaataaattaataacaaataaaacaatataatttaattctctccccttcaactctctcctcctctcttctctcattcaattccttcgtctcctaatttttagctaattaatacaaaatgatcgataattagaaagccaaatgattataattcttaagttatatccgatttttagtatatttgaactttttttatttataattaagaaaaatagtttaagatccgtattacctatattaacatataaaaataaaagtatgttatttgaacatagacactgatcctttgcatggtaacaaaatagcaaaaggtatataacattataaaaaattataataagtactatttcaccttaaatcgttgtacattcttagaattgcacttaacatgtcacgtgttacgtcttaaataaaaataaaaccttataagttggaagaaaaaaacatttgacaatcagtttccacttgaataggtggatccattattttttagccaatatgtatacttttaaaaaaagcttaagccaacatgtattacatcttaaatattagattagaagacatattagaaaatatgagaaaaaaatcaaatcatcagatttcacttaaatcatctctactattataaaaattgaagatgtttttgttggtattttagtacttcattcgtatttgagttggtttataagtctgttcgcttttagaaatacatatatgtatttgagtcaaattttaagttcgtttgcttttggaaatacgaaaggagtcgcataagaaatctctttaaaaaaacatgcattctaacttgagataaaagtcaggcacctaactgcatctcatgattttctaaactaaaatatccaagcgaatttccacgatgaatttcaccatagctaaaccgtataacaattacatgattaaaatatcttcacccgttacaacgcacgggcattttttctagtttagaaaggtagaaaaaaaatgcccctccacttcgtcctcccccacacatgcgcacaacacagtactacccaccccctcccctctcggctttagctatccactctacccctccctattttttatagcgagaaataattaaaattattaaaacaatgcataacttttaagctacacatgtaacctctaatcgaactattgttgtattcataattaaaccaataatttaaagatccataacgctaatatttgaacttgtataaaataaaacaagaaatagaaaatgtcaatagggaataaattcaactatttggagaaaatgtaataagttcataaaaaaattggctcttccattaaaattgaaccaaccattgcatgttccatttttataacaattttcaaataccttacatctatataacctataccataggattatgagtttctctgcatattattgcatataagtcacactaatgttcgaaagttatatttgttattattaaagttaattttttggattcatcataactaggtattttctttttaaaaagatagtataaatcacatatattacaagggaaggagtaattgctaaacccgatacggtgataggccgcccctcttgtggtctctgagtcacttgcaatatctacatgtttcatgtggagtaagtcaaatcacctcgctcgctttgcttcgacgaaacttcgacgacgcgttctcaccttcttccacgatgaaacggcgggaaccatttaaagccacaccacgccaattatataagccgagccacaccgccacagacgaagcaacggtaaacaagcacacatccacacaacggcaattaatcattgcagagagctagctagcagtgggcagtggctgctagttaggtgagcagtggctgcaacctgcaaggggcaagtcatggcatccgtggagacgtgggtagggttcgggtcggccatggccggcgtgggcttgctttggtcccggatgccggagcacgtccatgaggaggctaggtacatcatcagcagcctggtccccatggcgatgtcctacttcaacccctacgagcagatcaccgtgtccgagtacggcgaggagcggttccggcggaacaagatgttcggcgccgtctccacctacctgagccgcgtgtgtgccggtggcgcctgcaagctcaaggccgagctctgcaacaacaccaaggacgacccggttgtcaccctcgacgagaaccaggaggtcgtcgacagcttcgacggcgcgcgcatgtggtggaggctgtgccccaaggcctccaagaacaagggggccatcaccgtcagctactaccccggcgaaacggacgagccgcgctgcttccggctggtgttccacaagcgccaccgccagctcgtcctcagctcctacctaccaagcgtcgtccggcggtggcgcgagctcaccgccaagaaccggcagaggcggctgttcacaaaccacgccagcgaggggaacaagagcgtgtggaccagcgtcccttacaatccacccgcgacgttcgacatgctcgccatggaccacgcgaagaaggtcgacatcatggaggatctcacggtgttccagaaggggaaggagtaccactccaaggtcggcaaggcgtggaagcgcgggtaccttctgcgtgggctaccgggcacgggcaagtccaccatgatcggggccatggccaacttcctcgactacgacgtctacgacctcgacctaatttccgtcaagaacaacagcgagctgcggaagctcttccttgacacgacggacaagtccatcatcgttatagaggacattgacgcgatcgaggacgaactcactaccaagcgcaagggcaacaaggtagtcaacggcgacgacgaaatccgcgacaagcatatatatgctggtagagtttgccgacaagaacgatgagaagagcagagtgacactgtcgggcctgctcagcttcgtcaacaggctgtggtcggcgtgcggcagcgagagggtcttcatgttcacaacgaaccacatcgactggctcgacccggccctaatctggccggggaggatggacaagcacatcgagatgtcatactgccgcttcgaggccttcaaggtgctcgccaagagctacctggacatcaccgaccactcactattcgctgaaatcgggcagctgctagacgagaccgacacgactccggcagacgttgccgataacctcatggtaaggagcaagaggaacggtgaaatcagtcgactgctgctcgacgacgagatggatgggtcaccgccggcagacgtggccaataacttcatgctacggtgcaagaggaagagagacgcggacgaatgcctggcaggtttagtgcaaacactgaagaaggccaagatggaatccgcaacacctccaatggacacaatcgaggaagaggcaaaagaggaacacaacctaacgcaaaagaaagctacagaagggggcggatatatgatgagtgcacgctgctaggcatttgtaggttgggaaatgccacagctagactccttgttttgcgtttgctattttacctgacttgcgtgtttactagtcacttaaggttgcataaaccataccgtaaaatggaataatatataaaattagtggtgtaataccctagaattcgtcttgtcaacttttaaatgttatttaatcttggtaagaacagacttatattactgagtgttgtttgccgaaaatgcttcgtctcgagcattcgatgtgggatgaaatatgggacgcatcatcgagttggtcctaccactaaaccaatctcccacatttccctccccatggtcccttctctagcgtctcactctctttctctccgcctctcactctctggctctcggccacctcgcgagatggaatagcaggaggtcagcttcccaacctccaccaccgcaaccggaacctcaccgccaccgtattcagccacgctaagctctgggcaccggattacactagtacaacaacgatttttgtatgcgtccaaaataaattttagcatgcggctagacagcccgcatgaacctaggtgtgtgaaaaccaaaattttccatgcgagcagagcaaacgtatgcaaaaataggatttttgtgtgcggtcatctatgtcaagcgaacgcgaaaataatttcagcaaaaaaaataaaaattcccaggataaaattcgaaaccctagctccccgattcatcccaaaccctagccattgtcgtcacagccaccaccactgtcgtcgtcctcgtcatcatcgtcgtcgcagccgccgccgctcgcttccttcacctaaggccgctgtcaccgtcgttgtcctcacatccgccgccattgcttgctctcgccgcttgaggccgccgtcgcaacgccccccgtattcagattggatacagatctgctgcttccgttagcaccggtggcggatcagcctagtccgatgccgccgccaccgtccctatcccgaggccgccagttccaagcgtcgtcatcgctcctgagggtgggggaggcggatccatcccgtgactaccggatccgcgtgcaggagccgctcccgagggctggggcggcgaatctgcaccaagcccactggcgccgcccacccccgaggccactgtctttgtgcccccgagctttacaattgctttcaaattcagtatttaaagcagtagaattaatatgaggagaaatttgtaatgatttgcaacttttaaccaaatatcataatccacaaccatcatataagatttcatcttatcgcaccaacaaggaaaatcaactccataaaaaacatgtgggtaaaaacccaagatcggtaagagaaaaaagagaaaatgtggctttcacaccacttataggatcgaatacaagaaccaaccaagcctaccagaaaggtgaatggtagaaacacaaaaaccaaaacttttagtggaaataaccctcaaacctgatgaagtcctcggcgtagtgggtctaaccgccgtgtgcacactggtctgactacacctttgccgctagactaaccggtgttatccaaccggttagaccactacctccttgtcagctgtcttctcaccgccgccagtctaaccggttgtttgctatcggttagaccgccatcatcctgccggttagaccactcgccagaagccagtatgactattaagattcagaaaaaacacatatcgatgaaacactttaaagtagatcaactttacgaagtgcacctaaagcacttctctctcaactcataaactagaaccaaagcctcaaagcaaattatatttttttctcccccaagaagtcgatatcttctaacttgaactcctcttttatttatacctacaacatcgcggtccctagccatgaatccaactagaactagtactcctaatcatatagaaaacataccaaaccagggaaacaacatgctcatacaattccattcttcaatcttccatacttggacttcaatcctagtttgactcctattttcatacacacacaacaccatgagtatgccatatgaaaaccttcactttcacgtgtattgctttctagcctaaggatcccacataaggatatccttgatcatctggacctcaacttcacccaagcctagtctcgatccatcactagccatactcccatgatttcaagcaagatctgcacatgaacaacaaaaagactccatatccgagtacaagtttataccaacttgactcacatcaacacacaatagtatcacatatcaatagaaaccttctagaaaccataacatgaagcaatctacaagttccatgaatacaacccgaaactggctccaacctggagtatatcggtctgaccgtcgggccacccgatcaccacttgtctgaccggcggtacacatccggtctaaccggcctcctaaaagcgaccgatctgttcatcattcaaaaacacgatacgctgcattttcacaaatacttacatttgacaattgttcattacccagattaatcatcatatgattctacacatcttgcattacacgtacacatggttagagtagatgtgatccatttgttagtggtgacataaaaataaaaaagttttcttcctcatattgttaaacagagttcgttacatcagttatcattaatgtgttagtggaatcacacctaagatgtattaggtttttctcggttgctaatgtagtgtattcatatgtcatggaaggtaaaataatcacggggaaagcaaaaggatgcaaagcatacattccaagaattagatattactggagtggcattagttgtcatcttgaaccaagatttgcttttcagatttcaagaacttcaaagaaagatacttttctgtttactgatgtctgattttgatactctgtgtgtgtaaaattgctaatattgtttccttcacatggaaatgcttgcttggtaatgtgattcattttgttcttcatcatatgcatgtaaagctgaggatctagataatgatgtctgtatggcagcagatgacctgatgtcagctgctgcacctttgacagttactattgcagaatgatcagacactgtgttcaatatttttctgtagttcttttggaacatagggcttgtttggtttctagggacttattccaagtccctgtcatatcggatgtttggatattaacttggagtattaaagatacactaattacaaaacccattccataactttggactaattcacgagacgaatcttttgagtctaattacgccatgattttgacaatgtgatgctacagtaaacttttgataattatggattaattaggcttaaaaaattcgtctcgcggattagctcttatttatgaaattagtttttttattagtctatgtttaatattctaaattaatgtccaaacatccgatgtgacatgggctaaaaagttttagctttctaaacacccccatagtcaatacacattaagaaattcattaaggaatcattaacttcaatgctatcctttggaatctttttctcatgacaaagaaaatagagagaaaaaatagagggtttcctctcccctctcgctctatggctctctgccgcctcgcagagatgcaatagcaggaggcctgcttcccaacctttctttcttcttttcttaaccagtcaatgaatcaaaagtgtacggtctgtactttgattggtacgatgggtgattctacccatacaacgagaatatccatactgcttggatttatattctacctgggcaagagtgtatctccattctacctagtcatcacaaatttgaattaatgctattatctacacaccccatgattcatgaacaaagccaaaatttgcctggtcttaattgacttctatctcaatctttcacccatgctacaaagttgtattcttcaattcccgcagcaataggtatcgcctagtctaagaaataagattggaaataaccaagacagttcaagattaacaagatgcttaaatagatttgaaccagttgataagtactttccggagcgattgatatagaaaccgtaactaagaaagcaaatcaatcaaagcaagagccaataaatctggtaagcaatgcgagcaaaagaagaaccagtatattggacctaaccgagaagtactaattccaccgatacaaacaatgggttttgacgaaactaacttttttgccagagatcgaacttaaccgatgcatcctaaactcgaaaacaagaattcgtcagaaaaattagggtggtgatgcgccgaaagttgtatattttacaaagaccctgagtgtacatatttatatccatatacaatactaagtccgactctattacgattgtattgatatagaactctatctctaattaaggaaattattatagacttcgactcccaaacgactcatatcggctaatcgttacttaaacatatccgagtttgaacctcacacgactccatcagctcagaactctattaacaagaatagagactatgatacaccttcgttttctccggagcttactcaatcttggataaatttgtcaaaccgaatttctacagtatgaaggcttcctttgacccggccttgactaatgaaaattaacaaatttcatcattaataaattgggtagacaggcggcccaaccgcacagaaaaaatggttttgatcgcatgcaaaaatgttcttttaagtagtgtatgtttgtaaatttgtactctatctttgatcatcatataaatattcagtttatccagtaagtaggataaaaattctatgaagcttcttggatatactgtacgaaaaaatacaggtttagcaaacgggttttatttctagaatgaacacatatatgggtatctgaggtgcatggcaaaactcatcatgcatgcccacctatcttgctgtagccacctcgtgaagagccgcgtagtgagatttcctcgtcgatcagaccgtgcaatatcagcatgagctgatcgatcactagccgctagcgctaggtctttctcaataatactaatatgcatgcccgcaaacactgaggccgacgcccacccactcccataggggccaccagctaccagtgctacccaatcatcagtcaaatggtgcatctttcacttgatgcgcaaagcgttggttgataccgacccaatagccgatcgtcgaccggctcaactcggtcatcgcaacgggtacggacaccaaaagtggccggccatgggctcccgcggccgccacctctcggaccttcgccatggtggcccatctctacttctggcgacggcttccctcgggcgaggccaacacaagacctcgccgagacgccggatacggagggaaaaggaagaagacaccggatcaggaggaagaggaaggagtgagaagggaagaatgcaacctcgccgccacccttctcttctccaccatcaccgagctggcgagatggttgtcgtggtgctgccgagcttgccgtccttggaggtgccgtcgccggccatcccgccggtggccgactcctccgcctccccctccctcccatagttggcaagaaaagagaagaaagaataggctaatttgtgggccccatatcttttttttaactagtatgccacgtcaacgaaaccagataactatggccgtgtttagttcacccccaactaccacaaactttcaactttccatcacatcacatcacatccaaaactttcctatacacaaacttccaactttttttctgaacttccaacttttttcaggaacttaacacagcctatactattataggacctaaattgcacggtttgtatagtttaggagtgatgatttctggtgttgggagacaagggatgtcaaataaactcgacgtaaagttgagggatgattagtagacttaatccgccaaccaaaggcaatcttaattacaaaccagtcgatttagcccattgccatccagcccattagcaggcccggcaccatcatggtctccaattaacgtcagacactgctcctccttgtaataacaaacacacacacacaatctctcaggcaatttctgcccatgcttttgctcataatactactactactactaacatgttactgtttcctaattcttcttttttttgaaacagtttcataattcttctttgaacaaacaagaacaggaaaatgttagcactaaagtgcaagtcagcatatgttaccttttcaattgttccgatgataacgaacaacactgacgagcgaggcttaaacggttggatcgagatccaaccatccagtttgtttgggtccagctcgagcatggctcggctcggctctatgccaaagagtcaagcccaagcttccgttttcagctcgttgatggctctagagccgcttatttggctcgtgagcacgagttggcttatgagcctatgtcgtcatgtacttatatggattattttactttttagtggagttattaatatatcaaattgtaatttatcatctggattttgaagaattgaatatatgaacttgttttaattttacatgtcaataatttgttcttgctttcttaatgattacaaattatacatgaagagatgcttcaacaggtaggctcacaagccagctcaagccagaaaacaagccaagacgagctcacgctttaactcgtttctctaaccgagcgtccgagcctagccaagcctaatttgttacgaccctgtgcaacccgagagccagtgacccgcccgctctaactatcatgtacagccaacaaacacgtgcgcaattgcccttttttttccctacgattctaagaaatgtttgaagtgctgattgggggcttggggctttaccgctcatcgctaaaagtcactctagcaaacctctcggcaaatcaaggtagaggctgacctgtagtgtaccatagtacatggaaatacgataaagtgtgcattagtgtgggtgcatgtcatataaagaaaaggaacctgtcacgataaatatcatgatggttttataggcagtgactatggtacacgtacgtacactgttgtatttggttcagctgttgtaccaatatttgtttgcgtgctaggtaatttgtccagattaaatagtttaagagtaaattccctgtgtgcccctgaaaactcactcaattcttttcatacctctgaaatttacctgatcccttatatacccctaaaattttaacttgatcccttccatacccctactattacattttcctttggttgcaaatgtcttttttgcccatgatgctttaggtttgaatataaggttgaaaaatgattgaaaattttgtttaagtgcacaatatgtgcattttataaaactaatgagactaaataattagtgcgaaaaattttgacataaattttgaaaataaaaataaattaaattttttatttgaaattttaataggacaatggatatttttgattggcagcattcataaaaaaattattgtgagcattggtagtcctatccttatacgaatgctcatcattttttatgactttttttaaaaaataaatacatattttttatttctttatctaaaaataaattgtgtgataaataatgcatcgcacaacaaactcataactataatagtcttatgcgataaacttttacatttttaataatgtaatttatgaatttctatgttcgtccaaagggtaaaatggtcattgttatagaaattagacggtcaactgacgataggggtatggaagggatcaaaatcaaattttggaggtatacaagaaagtaagcaaaatttagggacatagaagggattagctaaaaattcaagggtatagaagaattttcttatagtttaagggtgtcaaatatctgaaattgttgatagaagggtatgcttttgcaatagttgagtaatccaataatcgatcttgttggttaggatggttaacaaaaaaaaattgttccataagtagcaaactattaggaccaataattttgataagtctggaaccatttaatccataattacatgaaaggttttcttcgacaatgcatgccaaacgtgcaacaaatgaggatacaataggtggtgccaagaatgcaatcgtgcacatagtcatcaactcagcatgatatttgttgctcccaaattccttttattgacatgcatgcacccaagaatgcatgcttatatcgtatttccctgtgatgtttatctttacggtatagtccactggtggagaaaccatctttcgtcggtcggccgatttccacaatagtcccggatgcaataaaaaccggggctaaagatcatctttagccccggttcaaaagggaaacgggcatatttgatctttagtcccggtttgtgttaccaaccgggactaaaaatcatctttagtcccggttcgaatgctgtcaggacctgtcaggcccccccgggatctttagtcccggttggtaacaccaaccgggactaaagatcttaacttaccaaccgggactaaagatcccggtgatctttagccccggttggtgctaccaaccgggactaaagatcttaactttagtcccggttggtaatactaaccgggactaatgatcccagtgatctttagtcccggttggtgctaccaaccgggactaaagtcccacccctatatatatgtcttcttcctcctccagctgcccgagcaagcttcaaaattactttaaaaaagaggggaggtcatgccaaaatttctattgaatttattttggtgattacatacaaatcggaggtgcctaaaaggtttgcaacttcatcctccaatgtttttttttgtcatactacatttgcacctatgttttgcacacttttttttgtctccaaaatttagttgtaagttgatgagagagaaaatgtgtgtggggaagaaagaatatatagaaatttagttcatttgctaaacaaggttttataaaatagttgagaaggaaaactctagtgaaagttaatcttaaataatagaaaacaaactaaaatgaaaattaaaagaagtaaaacacattaaaattagtttaaaaatttacaaatagtttttaagaattatttggtgtaatattttataatttttgtatgaataaagatatcttataattattgtatgactgtcattattgtaagaataattatttgtgtgcggtttttttgactcatgtagatggatcggcaatggatgtacgctgaccggcggtccaaagagtttattgacggcgtgcactattttttgagtggccgaagctaacaggcaaaggggttttatttgttgtccatgcaataagtgtaagaatcagaaggagtattctgcatccaagactattcatttccacttgtttgagtcggggttcatgccaagctataattgttggacatcccacggagagcaaggtgttgaaatggaagaagatgaagtggaagacgacaatattccggactttgctcagtatgttggatttgaaggaaatcaaacgggcgaggaggaaatagctgctgatggtaacgacgttgcggatgatcttggtcagatgttgcaggacgccagggaggactgcgaaagtgaaaaggaggcccataaattggacaagatgttggaggaccacagaacttcgttgtacccaggttgcgagcaggggaacaaaacgttggataccactctggagttgttgcaatggaaggcaaaaaatggggttagtgacaaggcatttggcgatttattgaaactcgtcaagaacattctttcgggggggaaacaaattgcccgagacaacgtacgaggctaagaagatagtctgcccgttaggactggaagttcataagattcacgcatgtccgaacgattgtatcctatatcgcggtgaggagtatgagaacctagaagcatgccctgtttgcaaagcactacgatacaagattagacgggacgatccaggagaagttgacgggcagctaacaaagaagagaattcctgctaaggtgatgtggtatttccctataataccacggctaaggcgtttgttcaggaacaaggggaatgctagaatgttgtgatggcacgctgaagagcgtcaacaggacgggatgctgagacaccccgccgatggttcgcagtggcgaaacatcgacagaaaatttaaagaatttggaaaggacgcacgaaacatacggtttggtttgagtacggatggcatgaatccttttggagagatgagcagcggccatagcacttggcccgttacgatgtgtatctacaacctccccccctggctatgcatgaagaggaagtacataatgatgccgattattattcaaggccccaagcaacctggtaacgacatcgacgtgtacctaagaccactggtcgaagatcttaaacagttgtggaagaaggaaggtgtccccgtgtgggacgaggacaaacaggaggagtttaacctacgagcgctgctgttcgtaaccatcaacgattggcctgcacttagcaacctatccggacagtccaacaaggggtacaaggcttgcactcactgtatggatgaaacagaaagtacgtatcttaagcactgtaggaaggttgtatacatgggtcatcgtcgattccttgcagcaaaccacccggtacggaagaaaggcaagcacttcgaacataaggccgaccaccgtacgaagcctaaacatcgcagcgggaaaacagtgtttgctatggttaaagatcttaaagtagtgttcggaaaggggcctggaagccagcatatagagagcgaagatggtcacgcggcgatgtggaaaaagaactctatattttgggagttaccatattgggaattcatggacgtacgccacgcaatcgacgtgatgcacctcactaagaacctttgcgtaaaccttcttggcttcctaggtgtatacggaaagtcgaaagatacactggaagcacgtaatgatctgaagcatatgaaacaacgcggcgaccttcacccggaaccaaaggagaaaggaagccattacttgagtccagccagctacactcttagcaaggcagagaaggaaagtatgtttgaatgcttggagagcataaaggtaccgtctggatactccacgaatatcaagcgaataataagcacgaaggagaagaagttcacaaacctaaagtctcatgactgtcacgtgttgatgacacaactgctaccagttgtaataaggggtatccttccagacaatgtccgggcaacaataacaaagctatgtgcattcatgaacgcaatttcgcagaaggtcatcgatccggatagattagaagcccttcagaatgaagtggtgcaatgtctcgtcagttttgagttgatatttccaccttcatttttcaatataatgacgcatctgctttgtcaccttgtgaaagagatccgtattctcgggcctatgtacctacacaacatgtttcctttcgagaggtacatgggcgttctgaagaagtatgttcgtaaccgtgctcgtccagaggcaagcatcgccaagggttatggaacagaggaggtcatcgaattttgcgtagaatttatcgaagaccttcgcccaatcggggtacctgaatcacgccatgaagggagactacggggaaagggaactctcggaaggaaagcaataacgacggtagacaacaatttattccgtaaagcccatttcactgttctgcaacactcttcattggtagctccttacatcgaggagcacttggctctagttcgcgccaggaacatcggtaagtccgatgcatggattacacggcatcacattgatactttccccgcgtggctacgacaacatctcatgggtaacgagtcgatcaaccaacaacttgccttcctggcgaggggaccgtctgggtcgatcgcgacattccagggatatgagatcaatgggtacacattctacacgagagcccaagacatgaagagcacgaaccaaaacagcgctgttcgtgtcgatgccatgggacacgatggaacaactgccacgtattacggtgccatcgaggacatatgggaacttgactatggtcctctcaaggttcctctgttccggtgccaatgggttaggttgactggtggaggcgtaatgattgatgacagtgggatgacaactgttgaccttaacaaggttggatactcggacgaaccttttgtccttgccaatgatgtaacgcaagtctttttcgtgaaggacatgtctagcaaaggaaagaagggcagagggcctgatgagcctaagcgtcaagtggttctcccaggcaaaagaaaaatcgtcggagttgaggacaagactgacgaggattacgattattagaggtttcaacaagtttaaatcatgtatatgctagttatatgtgatacttacaatttttaaaagttttaaatcacacaggtggcaatttcatatgtatgttaattagagtttttaacatttaatttactagcattcatatgctaattataattgactagaggatttttaaaagttttaaatcacgcaagtggcaatttcatatgttaattagagtttttaacatttaatttactatcattcatatgctaattataattgactggagaatttttaaaagtattaaatttaatatatttttaaaactatcattcatatattagagtttttcacaatttaatttactatctttcatatgctacttatatatgactattcgaatttttaaaaggttaaaatcatgcatgtggcatttacatatgttaattagagtttttagcatttaatttaatataattcctacgctaagtacatatgatgattacaatttttattaattttaaatcatgcagtatgtacatacatatcttaattagagtttttaccaatataataatatcattcatatatatgctaagtatatatgattattggaatttttattaattatatttgcttattacgatttatccacttaatttattacagccaaaaataatttttcgaagtaattgtcattaatctttgtactttacataatgttaatgcattaacttctattttataaacacatatgtaagcgaaaatcatatgcagtgctataatctttagtcccggttcttaaccctaaccgggtttaaaaagaatttcgaaatagcgggaaaagatatttactcccggttgttgagaacaaccggcagtaaatatcttttctttactcccggttgttctcaacaaccgggactaaagatcttttctttactcccggttgttctcaacaaccgggactaaagatatctttagtcccggttgttgagaacaaccgggagtaaagatccaggggtatatatattcccggtgcgccctcgtcttcttcaccaacacttaaacgttttcggccgatcgatctctctcggcctctctccttcgccgccactgcctagggcaaatccccgcgccgacgccgccgtatctcgccgtcgtctcgagctcgtcgtcctcgccgccgcctccgcctcctccgctgccgccgcatctctgaggtgaaagccgccgccgccagatctcccttcatgcatctcgatctctccgatctcgatctctctccgtcgcgccgcccgccacaagacgccgcgccacgacgacgacgcgccacgccgccgccttcgacgccgcgcaacgccgccgccgcatgccaacgccacgccgccgccgccgtcgccacgccgccaccgccttcgccgccgcgcgcgcaatgccgccgccgccacgccacgccgccgccgccacgccacgccgccgccgccacagccccacaacgccacgccgccgccgccgtcgccacgccgccgcgccagccgccgccccgatgccgccacaccgccgttaacgaacgagaacgagaacgatcgaacgaacgagagcgagaacgaacacgtcaacgtacgttgccgcgacaacgtgaacgagaacgagaactatcgaacgaacgagagcgagaacgagaacgatcgaacgaagacaagcgagaacgagggaacgaacgtgaatgagaacaatcgaacgaacgtgaatgagaacgagcgaacgaacgtgaacgagctagggaacgtgaacgagcgaacgaacgaggacgaacgttaacgtgaaatgcaatatatatatatatgtatatatatgtatatatatgtatatatatgtatatatgtatatatatatatatatatatatatatatatatatatatatatatatatatatgttacttcgcatttatcctaatacatttttttgtatcttgcagaaaagacgtgttgtcggagtcgtccgtcaagcctgagtggaagagctagccctagaaggaattcgagcaggcaagtgacgtaataatataaatgattgttatatttgtaatgcaattaattaagattattagacctgcaattagacttatcatataagattgtgtagtgttctaatattatttgagttttaatataagattattttattgcaaattagacttagtatgacattattgactacggaattggtgcgactcctagcaattgactattgtagtcttaattagacttagcatatacgcacgaaacacttagcatacattactattttagtcttagcatgtaatattatttgagttttaatataatattactttatttgtaattagacttggtatgtaattattgactacggaattggtgcgacaagtagcaattgactattgtagtcttaattagacttagcatatacgcacgaaacacttagcatacatgactattttagtcttagcatgtaatattatttgagttttaatataagattactttatttgtaattagacttagtatgtaattattgactacggaattggtgcgacaagtagcaattgactattgtagtcttaattagacttagcatatacgcacgaaacacttagcatatacatgactattttagtcttagcatgtaatattatttgagttttaatataagattattttatttgtaattagacttagtatataattatttactagctagggttgtataatatacgtcacctagacttagcttatatcacgatttgtaattagacttagcatgtaaggttgtgtagggttctaatgtacgacatttacacttagcatacatgacttagattgttaaaacataaatgtctcgtgacttagcagatgtttcttgtatcaacagatggctgaccgcgatgaggaacagatattgtacgatacaatcgcggagggaagcagccagtactggaatgaagaagaggggaacgaggatccaaaccagtacttgaacgaggaagggaacgtggagagggatgcggaggggaaccagcaggggcacgtggaaagggatgtggaggggaaccaggaggaggaggctagtggtagtcaaccctccgttggacagaagagggcacgcgggcaacgaggtgcagcgaagaagcttgagggtcggcacatcataacggaagtggaagaagatggacgtcctagtgccccggccgaagccgccaagaactatgtacgtcacagcggttgggttgtgcgggataacgtgcctgtcagtacggtgtactggcgaagaacaagggcacgcggagatcatgagagctttgtcccagattcggagaaagagatgctgtggaccacaatgctcgagacattcacccttcctgcgggtacagaggacaaagtgaaaaggtggactctgaagaaaatggcagaacagtttcagagcttcaagggagatctgtaccagaagtatatactgaaggggcagacaccgaacttcgacacattcccaaagctaagggatcactgggacgagttcgttgcatataagacaggtgaacaagggcaggtgatgatggaaagaaacaaagaaaatgccgccaagaagaagtaccatcaccacttggggtcaggaggctatagcgtcgcgatgccgaagtgggagcagatggaggctagcttgattgagaggggtatcgaaccggcaacagccaattggccggaacgatcgaagttctggtactatgctcacggtggaacgctcaacccagctgatggctcactggtcttcggctatcagatacaagaggctgcgcgacgactaacagatgcagtggaagcctcctctcagggcacgttccgaccagacagagatagggacgagctgacactcgccctgcagactccagagcatccaggacgaactcgagggaaaggggtgattccttggaagattggtttcaaggaggacatccacacgtacaggagtcggatgaggagcaagagagataccgaggcgaagattgcagacctagagttccgggtatcgagctacgaactcaacatgcaagaggaggtggcaaggaaggttgatgaacgcatggccgcacatcggtcccatgatccccagccgaccattcctcctgcaatggtgagcccgtcaggaaaccgtagcagctgcgcctcaacggggcaggtaggatcgcagagcatggacgccatgcaaacacaggacgaatcgacctgtcccgttgatgacatcactcagcggacaccatgtgagctgcatattcctttcaagaacttatcaataaaggtaagatttagccattccgctagttgctgcttatatatgttgattactaataaataatctctcacaacatgaaggtggcgtcgggcatggccatcccaacggacccttcaggtacttaccactgcaggccgattccagcaggatactccaaggtcgaagttgagttggtcgaaggcgcgtacgaggacctcgagctggattaccctggaggagacggtgagacgcatctacgagacacatgccatgccattattctatggcgcaggcggtacatcatcctccctgggcgacaagcggcgtctcgtgtaccatctcctccggctctgccatctcctcctcaggatcctgcaccgtctcctcctcatgctccgccagcaccgtctccaccgcaggctccagcatcgactcctcctcaggatcctgcaccgactcctcctcgtgctcctacacctactcccccgcaagctcctcttccggcaccttcaaagtcaagggcccccccagctccaccgcttgcccacacaagggcaacaaagaaggcgaaagttgacgccgccaagaacaaggacccggggtacgattgcacgcaagaggagcttgacgcttacgttgcatcagaagtcaagagacaattcaagcctcgaagtccagaaaagaatattcctatagaccccagtgtcaggaacttcttcaggggtatgtctgcatctgtcaaggaggccatcaagctatcggactatgagcgaacgctgaagaaagcatcttctggaaagtccaaaccagtccctcagcttggagagcaaccaaaccaggagatcgagccgttggtgaccggtaaagaaatgacgatagaacaatttattactgacaccggtctaactacggatcaattgctaagagtcgcaccaatcgaaaaggtggaagtgaaatacatgtacgaactcggtaaaccgcttgtcaagcctgagctgctgcagtccctacccacacaaatgtacaagttccatcagctgtacatggagatgagcgccaccggtagagagatgatcggagcgaggatcagggacacggacttcttgcaaggagatgacattctctggatcaatttcaggggaatctacgaactataccagctggacgccctcgacgtctctattatgagttgctggattttgtaagtatatcgttcagttagatttcttactatacgtctcctttaattaattaggtccttgtatataagtagaccatagaaaataatatactcccatttatcgttgtagaatggagattcaaagggcccgacggcggagggttttcgatactggattcatcgaccctcggaaagtaaacgtcgcaatgctcgaccaatatccacaagaaacagaggacaatctcgtccatctcctgaaggcgcagcattacaagacgttcatactgttgccatacaacacagagttagtttaattttactgtcttcctacataccaaatttcattcccgtacgaacttgctaagtgtttcatatgtaatgcatcccacgcacattgcagattccactgggtgcttttactcatcgacctggaggcctgcaccgtcaacgtatatgactcaatggataaaaaagagtctacgtttgacaaggttttcgaacttatagacaggtaccgtcataagttcctttgttaattaagaaaatcttgttatgttaattgctactacgaatcatagctttaaactccatgtagggcttggtatcggttccgtcatttggtccgcggcaaatggagagaaagacttaggcggaagttcaaatttcctgtgagtacacatgctctacatttatatttctccgattcaaatacatacaagtgtatattaattagatctctcgttgtttgtcatttatttgtagtgcgcaaagcaaaagcagggaactaacttgtgcggctattacgtgtgcgagtattgccactgccttgcagaccaaatcatcaccacaagagagctcgatgtacgtacaaataaattcaaaatttcattacgtagcgatttcttgtttaattactaatcaatttcatacattcatatagtttattcgcatgagggataacctgaccacacacaaggaatttatcgcggcgtttcaagaacaactcatgggattcatcaacgaagaaatccttgatcccaagggtgaattctactacgacggaaacacaattcaccggtccttagcttctgagctagcagcgagtactactacgtcgaaatcgtagctagctaggacatataatggattgtaattaatacatgactacatatgtttctatatgcatgtgtacacattttctataatgtaaatatattttgttcatatatatatctatatacatatgcatttgcataacatatatatgtataaatacatatatattatgcatgtatatacatataatataatataatatatatatatatacatatatatatatgtatgcatatatatgtattgaaacatatatatgccatggtttatatatatatatatatatatatatatatatatatatatatatatatatatatatatatatatatataaaccatgcagcaacaggggcatgcaaaaaaaaaaaaaaggtcagctcgatctttagtccggttggtgttaccaaccgggactaaagatcgatctttactcccggttatttcacccgggactaaagatagcgatctttagtcccggattggtactcccggtttggaaaccgggactaaagagggttacgaaccgggactacaaagggtttctccaccagtggtccagcctttacttttgatttttcttgacaggtggctaacgtgacaagttagtaattttagtgttaagcctccataagacactccaacatttctttttattctatgtacaggtgcgattgttagtggtgcatggtgagaggaatgaagagatacgaatggaataaacgcaacaaacaagaccaaccgtgcgcggtagtcaccaacgacactattacaatagacatttttccacgcggtcagaaacaggtttccgcgtgcggttagtcctaccgcacgcgccaaaagtctgcaaaagacactatttttgtgtgcgggtgcttatgttatcttaagaaaccatatgcgaaaatggtggtcgatttttgcagacgtagtcagttatggtccgttgtaacctaacgagggtctcgtacagaaaaattgttttttatagtgcggtaagatcagcatgatatttgtcgctactggatttcttttcttcacatgtatacagtaataaatgcacgctttgtcccatcttccatatgttactataggagtataggtctgagtcttgatttactgaattaacctccaaaaaagcactcccacatattcctcgtgaaaatggctgcactacttcaaatccaccctcaccttcccaacatcgtgcaaaatccaatcactcggagctagcaagaggcagaccaaatggcaggcaccctgaacatctcagcacgtgcagaccaaattaattcacacgtcttcaaactcacaaagagaaaccaactgattttgcccctctaaaataaaacttggttgaactaaccaaccaactgatcaagacaatccccacagagtttaagcaaaatccgatgaaacacgctgctactattattgacggtgtgtctccagcgacgcacccgttcgtgggagaggattctctcgttgccacatttttggcaagctttggttcaggttgcatgcacgctttggcccgaaccgttcctccacgtgggcaggggcaggggcagcgaaggccggcaccatgatggcttctaattaacgtcagacactgctcctccttgtaaacaaacacacacacaatcactcgctgaatttctgcccaagatttgtctatgctttgggtggaatgcaggaagaaaattgtagtattactactactaagaaattttgacagtaacacatttactacttcgtaatactgctaatttattaaaattttagtattaccaaattttaaaatggttcattttaacactaaagcggaacaggccatcaggccctaaaccgttggatcgacatccaaaacaaccaagtcactagtcaccgcctctcaaatatgcccacgtgtcttcactgtaccgatcgtgtacgtaccgccaacgatcacatccgtattaccttatttgtttgaagattgtagaaaaatgttgaagttatggttggaggtttatcgctcattgctaacgtcactctagcaacctcttggcaaatcaaggtagaggctgacctgtagtgtagaaggtcaatattacatggaaatatgacaaagtgtgcattcgtgagtgcatgtatatagagaaaaggaacctaaaagtgataaatatcacgctggttttttagacagtgattgtagatatgatcgtttgtttttcacatgttatataactatttgtttgcgtgcttggtaattcgtctagattaaatagattgagggtgtcaaatgtctgaaattatagttaggagggtaaatcatatttttcacaatagtcgtgtggtaaattagacttaacctaattcaagaaactaagaacaaaaatgaatggtgtaatcccataatcgatcttattggttaggatcgtcaaccaaattaatctaaaaatttgtgtcgtacttatgaatcgtgtgttgttccataagtctggaaccatttaatccataatcatggacaaggtttcctatgatgatgcatgccaagcatttaacaaatgagggtacaacaggtggtgcaaggatacaacagttcaaccatagtcataaactcgatatttgtcacttcctaattccttttcttcacatgcatgcacccatgaatgcatggttttatcgcatttccatgtgatttttatctttacgatatagtccagcctcaaacttttgatttgcttaataggtggctagcattacaagttagcaatgttagtattaagcttccaaaaggcactccaacattttttttgtttgtgttctaaaaagccccacgtatgcaatcgttagtgttagtggtacatgatgggaggaatgaagacacacgaatggaacaaaagcaacaaacgaggccaactgtgcgcggtaatcatcagctacaagattagcatgatatttgtcgctaccggagtctctttcttcacacgcgtgcacccataaatgcaccctttactacggccgtgtttagatccaaagtttttcttcaaattttcaactttttcatcacatcaaaactatcctacacacacaaacttccaacttttccgtcacatcgttccaatttcaaccaaacttccaattttgacgtgaattaaacacagcctacatctcaactgcgtaatatttcacttatcatactacaggtcggactgttgatttactgaatttggtgtgacaagtgaagcatgagggtggtaaattaacctccaacgagcactctaacataatattccttctattttgtttcctcccagagatggctgcgctcctctaccgattcaacattctctctgcttccaaaagcacaagaggaagaaaggaggaggaggcagagaaggccaccaaaaacccaatcccccaaaaaagaaacccagaattcaaaccaacaaaaagtttgcccaaaaatccccaaactttccaaaggccaatccacactacacagtgccatgtaccggtacccagcctctctctccctccctccctgtgcaggctgtgtgcagcagccttgaccagaaccgggccagaccggatcacttccttctggtccctgtcgggtcggtcccctcctccctctccctctctctctccaccgcgccggcccggttcgactcgaccacaacacgcgacgccacgcctcctcccgatccgctccggccgcgccgcctatgtaggcctctgggtccattcacaccgcctcttttcgtttcgtttcgccgcccgcttccgccgcgcgcgcgcacgtgcgagaggggagagggggatagcgacgccgcgcccaaaccctactactactcctcctcctcctccgcgtcctcgccggccactcgtcgccggcctccgtcgccgcctccgcctcgtcatccaccagaaggtaggcgccgacctcctcctcctctttctccttctcgagcctacgcgggcgagggttccgaggtgtgcgagtgtggtctcgtctccctcccggagacgcgtgctccggtgggtgggagggatggtgtccgcgtcggtttgggcggaggcggaggagcgggggaagggggcgcgtggcccgaggcggcgccgctgcgtgtcctctctctcgcaagctttctgcgggcctttttggtttctccgccgatgctctagttcgtcgcatccttttctgtgtagtattttcgttgcagatggagccatggaggtggcagatctgtctcgtgaccccccggagttttttgtttcaggcgttcgtgcgcacgggtttccgcgcgatgagggtctcctcggcgtccagtacgccgccgccgccggcgttcgcggccgcggcgtgggcggtggtgctgctcgccatgctccgctccgacgtcgccctcgccgccgccgcatcctccaacgacgacacaggtgacgcaccattccaaaaccaccccgcttcatcctgtgcgctgctgcttgattctcccacacatgattcgccagttttttttgtctgcacatatatttctgaaaaaaaaatcgcactcctttcctcgtcaaatctctctgcgttttggctccgtttcgatgagatcattctccctaaaaatttttgtatgaataaaattctcgaaataccgcacgggtgcaatggatttgcaccattagttttgcatcactaggagcatcattaataattacggacgagatctctctctctctccctccatccgtgcggtttctggaatttgcattgtactgctactgttcatcgtgttcatgcctccacgtcgacctgcgccttcctttccaagattgggatacgaacaaggagaggcgcagcgcggtgggcccaccaccaacccacccacccccacccatccatccattcccatggattcgaaatgttttttttttggttggttggttgatttcgctctgttcgtatcgctgttctcccactgtgtgctactgccgccgccgcgtcgtggatttgtcgcgtggggtgaagtttttgggcttttgtgtgtcgctgacggggtggggcccactccgggttggtcccacgtgtctgtcgccgtgtggcgggggtctaatcgtgcgggcgtttttttgtgcaggtctctcgccgttgatgccgccgccgccgctcgccgccccggttcccgcggcggtttctccggccccggcgacgcctcccgccgtcctctccccccgcaagctcctccgcccgcaaggtaaaagcaagcttcctatccccgattccctcggcgatgcttatctcgccgtccgattgaccgatcggacggctgctgcttggcccacgcggccggcgctttctccgacaagcctctgacgcaggccgtgggggccagaggggggggagcctgatatgtggggtccacggagacgcctcctgttttgtcctcggagacgagacgatccctttggcgcgccatgattccgtcgccctcacattccattctgtcgtatcggagcatgacatgtgggcccgtgtctgcggtgctctcagtttttcgtcgccgcatgcatgcagtgactgaccggtggggcccgcttgctttcaccctttttgcaggcgcggacgtcgtcggcgtcggtttcgtctccggcagcggcggcggaggaggaggagacggagtacggacgcgccgggtggacgacgggtgcgcgggggcggacgacatcgcgatctaccaggggagggcgacgccgctgccgagcggggtgccggcgtacacggtggacgtgatgaaccggtgcgccggcggcggcggcggcgacgaggagtgcgccatcgcggggatccacgtgcggtgcgggtggttcagctcggtgagcctggtggacccgcgcgtgttccgccggctcggccacgacgactgcctcctcaacgacggccgcccgctcctcgccggcgagaccgtctccttcgagtacaccaactccttcccctacaagctctccgtctccgtcgcaacctgcgtcgtcgaccccgccgccccatagccgccgtcaatcgccgcaaggaaaaagtagacaaaacaaaagaaacgaaagagaaacagtagtactagtgacatctcttgccttactagtttttttgttcttttctttttttttgaccccatgtcagtatcactcacagaacaacagctcaccatttgctacgcctcacgcagtgcgtactcctcccaacatgtatgaaaccctcattatactactactagacctgcagtatagcgttagcagtagttcctgcttcttgcatgcagcttaatgttgttgttaagttgcctgtcaggcagaccaaagtgtaattaaccctgttttactcaaatctctcgggtggttttggcgcggatggaacaagtttatttttgtcactctttggttgtgcttccctctcgtggtactgtgctttgaggtggtggttggttgtagcaaaaccgggaatgaatcaggtcacgtgtaagtacaatcggtgcatgcatgggtgacagctcgtcggaagtggaattaattgcacttttgaggctaaaatggaatcttctctttctctccccccctctggctcgtctcaggcccgggtcaagttaacaactgtagacatgtccttcaaccttcgcccttcgtcttgttgcttctgctacgattgcaggtttgctacactgttcgttgcagcaacaaagcatgcatgcttgcttgctttctccttttggctcaagcttttgcatgtggtttggcccctgtgctgagccctgtgaggcagtgaggaggaggtcccagttccatgtcatgtggaacggaatgccatcttggcaaaagggcaatggcaaccattgctgcctccccacaccgtgtggctcgtgtcgtgtgtggttgatgggtgaatcatgccgctgcgatgctgatgctggcaatctggtggtggcgtgcatgtatacggcggaggcaaaggtaggggtgggggtggtgttttgtgcaaaagaccgtggtcctctgcatgaagtctgtgttgttgacagatatgcgatggacgcgacgcgatggggctttgtgcctttgcctgcgtgtggcattaattggagaagggagtgtttatgtgatgcgatgtgatgccggtgccctcttttcttgggatgtgaagggcggagtagtagtagcagcagtagcctcgtattgtagggatggttcatgatgctgctgctactaggattgttggtggttggtgtaggggccctggcgttgggtttacacgtgtactggcatttactgttacggggttcctcttcctccaagctccaactagctctgtgtagaagaatggtgtgagaattgagatgtgagttcagacactggcatatgaattgaattgaattgaaggagatggccaggcgaaggaaggaatgcaggaaggatcgatgcaaaatccaatccaaggagagcgaaatttcattcgtgtgatgggggggccctgggcagaggtagtgaatgcggatgaaggcgttcgtgaacttgccaaatcagccggcgcattgaagcatgtgaacgccattgaacaccgggaacactaccactttggagcgaggaggtagtaacagtgatgtgtacagtagtggcagtactagaatggtgcactcctcaacggaaaacggggggggggggggggggggccgggtgacagcgagtgggcggtcaacagaggagagggagagagtaggcacgatcggatcggacggcctaggaagaatgaaagccccgaattgtgggcgcagggtagcgatctcgccggagtggcatgtcgcgggagtcccgttccggaatgtggtgaacagtgacaacggccatccctctactggttgagctcctcgatctccatctctacagtgacagtctagtactagtagtatacaactacatgcgacttgcacatctctgatctctcttgctgccttgtgtctttttttttcttctcccggatgacttgtgtgtatgtgcatgctgagactaggccagtacaccccaaaattttacactccatcacatcgaacgtttgaacatatgtatgcatgaagtattaaatataggctaaagaaataactaattgcacagattacgactactttgcgatacaaatctttgacaatgtggtgctacagtaaacatatactaataacggattaattaggcttaataaatttatctcgttgtttaatgaataggtttttttgttagtgctgaatacaccataaggtactctatataatatccgatgcggtaaggctgtgtttagttcacgccaaaattggaagtttggttgaaattgaaacgatgtgacggaaaagttaaaagtttactactatatgtgtagaaaagttttgatgtgatggaaaagttggaaatttgaagaaaaactttaaaactaaacacggcataagctaaactcggaaaagttgaaagtttactactatgtaggaaagttttgatacgatgaaaaagttaaaagtttgaagaaaaactttaaaactaaacacggcctaatgtaaactttacccgaggatctttaaacacaccactactagggctgtgtttagttcacgcaaagtttggattttggttgaaattagagatgatgtgactgaaaatttgtgtgtgtatgacaggttgatgtgatgaaaaactacagaagtttggatccaaactggatctaaacacagcctagaggaggaggatccggtgcgtaacaggggcagcagggctagatgtacaacctacgggtaggctgtgctgctgcagcacacggaccgaaacggaaggagtacgctgggcgcaaggcagcagcaggggcggggttgacactacacttggggggctggacggagatcgatgcgcggcaggagctggaatggacggccgcggctgagtacgtgcgtgacgccttgacctcggggaacgaggccgagtttaattcctccgtgtagctagcacgggccactaccgatggctttcatcgaggagaaaattgctagtttgccatcattcaacaggggttttctgacttctgacttgtgagaatactatcttgtagtatgccaaatagtactccctccattccaaattaatctacatatagtttttttaaggttatttctaaatgatctacatatttatattcatttattaggtctattcgttatttgtgtattggagtaagagcagggacaatagcaggctataagccaaatgcaaatatattttaaggagataaataaggagagagatgggcagcgggctacagattaatagccagctatagtacggactccaagacgcagcgtgtttatgacaggtgggaccaggtattaatagtgtagtactccctccatctacttttgatagtcatatttccaaatctgaaaattttatttttgataggcatatttcaatccaacaacctatcatcttaatgactttctcgaatttaatgcatgactctctattctttcacacatgattggctacatgggcattgagaaatgtaaatattaatgaatcgcttgtttacgatgaataactaatagcatgtttaaatggatgataagtagaattacttatccttggtctgtgtgccaagatgaaatatgactatcaaaagtagatggagggagtatgtaactattgtatgaatgagctattagattgactatagatgaattggagctagtagttggctatactattaaacttgctctaaatggacattgatgcatgcatccatgcacacatgtatttataacccacatgcaatattttgatttgctattggctagaaaatagtggggatggtgcatgcattgagtttgttgctatagtaaatatagtatgagagagagttattagcttttcttggtcttggtgtacctatgaaatatatagattaatttggaatggagggagtattttgttaaattgatattcccaaaaaatattatgtagtacacgctaaaattcggctttgttaaattgattgtagtatcgtaaagggcatttctcaccccaaaaactagacattgagccaatgaggtgaggggctcccccacttatatattaggtcatttgcccttccacaaccaatgtaggactattcaacaatctcctccttcacacattggaatccctcagcccttcaccgcaccttcaccgtatacgggccccacccacggttcatcaggtatacgggccccgcaggcacccacggtccatcaggccttcacacactgtgttcatcgggccaatgtgtccctcagcccttcatcgcccctttaccgtatacgggccccgcccacggtccatcaggtatatgggctccacaggcacccatggtccatcaggccttcacacactgggtccatcaggctagagatgttaaactagcctgggtccatcaggctagagatgttaaactagccaggctctgatatcaattgtaggatcgtaaagggcatttcccaccccaaaagccagccattgaggtgaggggttccccaacttatatcttagatcatttaccctttcacaatcaatgtagaactattcaacattgatattcacaaaaaaaaaaagttacatgctagaataccctttgacatatgagtgaactgaaaatttgaaatgcacctcgtcgaagagggacacggatgagtacatcatgcctagctcttctatcttcctcactccttctgcatcggcgcgacgacagaccaccatgacctgcgggctgctgaagagggccgaggacaagagggtcacaggacgacgatagatgtacaacgacggcggctttgattaggcggcacaactagggtttggcgggtggagggaattaagtgatggtgggttaagggcatcctcaatgtttgtggtgtagtgtaaccttaaggtggccctatgaatagtgagccattgttaaagccatacccacaatgctaaggttagaatttagccacaagatgggcccacatagaatggaaaaataattgtttcatctcttgttcatgaagtgaatgagagagaaaaaaaatattttctttttgcttgtggtagatcttaagcataaggtgcaccctaagttaatgctactttccacaatgtatatagcttactttacaagtgtaatcattatcttaaggtcatcttttttatacattgtggttgctctaagctggtggcaatggagcgcatgccagagccagtgagccgaggcggcggtcatggagttcggtggccacaggcaaagcacctccggcatgttagaggaaggtaggagtcaaggatatttttgtttttatgacattttttatatggatttaattgagagtagcaatttaacaaaaccaaaatacaggatagtatcattctagcaaacctgtgctttggagatgggacgagagccgtgtcgggaggtgggacccacccacacgtgacaggccacggctgctccagtaccggttctttccttgtagctttacctttccagtgcttcgtcgtgttgtctggccggccaccgtcggtccgtccggtggtttctctttgcatgcgccgacggcggcgtggtcatctgtctgtcggctacaacataatgcagtcagtgtactcctatgcggtatcaaacgattgggggtgtttagatctactccctccgtcccaaaaataaataatctagaagaagatatgatccctcctagtacaacgaatttggaccagatttattgtacaacaaatctggaccagattcattgtactagagggtgacccctcctaggttgtcttttttttttatggagggagtagtggtataaaattttgacgtgtcacatcggatattatataaggtgtcgcataggctattcggacactaataaaaaactaattataaaatccctcgttaaatcgggagacaaatttattaagcctagttaatccatcattagcaaatgtttactgtaacgctacattgtcaaatcatgaagcaattaggcttaaaagattcgtctcgcaaattagtcgcaatctgtgcaattagttttttaagtctttatttaatatttatacatgtgttcaaacgttcgatgtgacaggtgtacaatttttatgtgggtcctaaacagggcctaggttcctgctccggcccttcgtttcgtagaatggagtaaaggtattttgttttttttccttaagtggcaacattttaacgtactcccttcccttggtcccgttccaagtaccgtcccattttaagtgtagtcatacgttttttttccaatatttgatcatccatcttatttaaaaaatttatgataaatttttaaaaattaagtcacgcataaagaactattcatattttatataataataataatgatgataataataataataataataataataataataataataataataataataataataataataataataataataataataataaaaaataagacggacggtgacactgaaacccacaactggacttattatgagacaaagggagtagaacaaatatattataaaaatatactattcaataatggagtttcattttttagagcgatagtggagttaatgaattgattttgtgttttaaagttgttattttttataaacttaatcaaacataaaatagtttgacttataacaaaactaaatcattctagtacgttctaagatgcacgaagtattagaaacttatgaattatatttctttagtttttgcacatattctttaaattttcaacgtaggtaggaaggcagaagtgggtcatttggtccaattttatttttaactgtagtgaaaggatatgtaatgagctctaaaactatggcattgtaataaatacatgaattataatgtcatatgcctaatcctaaaaatttataatagcatggatccattaatccaaaataattctagcagtggcaaaactaccttggaacgtgaattgaggtattacctgtgcaacttgaaacaggcttgcttagaaaaaaaaaaaactcaaaggatcaaaagagagtttcgcgcttgagaaaatttgaggctgtaccacgagaacaagtcctcctcgcagaataaatcaaattataaacgttccgacaaactcccacttcttaagggcctattctgttgtccataaaatgaagggataaaggaggagattagagagaatttacaggaattaattttacattttaataggtacgaaattattcttcacaaaatccgcttcgaccctcgataatgcttcctaaaatagttgcaatgctgttttctcgtgtgaaataccgtacaactttatattcctctagacaaaaaggaaaaaagaacgaattatccctgaactatcgcggttgaccgaattaccccttaacccaaaaaccagatattgctcaccctgaacttttaataccggacaaattacctccctcgacccaatccagagcggttttgtcctacgtggcgtgcgcgtggcaatccagtcagcattttatttataaaaaaagtggaacccacctatcatactcctcttccctcttccatctcttttctctctcactcttcctttctcttctctctctctttcactcactcttcctctctctcgcgtgcgggccgagcagcggcacgtgttccgcatgcacggcgcgcgggtggtgggtcgagccgtgggatgtggaggaggcggtggcgcaggacgccaaggcggctgccccctcagtgcggtgatggacggaggcagggacaggcggtgggcgggtgtggacggcgaacacggaggtgacacacacggcacggcagagactgtggtggagaggcgggcggtcggcgcgcgcaggctggtggtccgagctgattgcagtccgtaaaccaaccgtgggcggcagcgcgagacgcggagggagttcgacggagttccctcccactccctctcagagttcgccactccctcctctgtgtcccgcatcgtcgccgcctccgcgtcccctaccgtcgccgcctccgtgtcctgcggcgccgcccaccgcctgccgccaacccgcaagagagagagaggaagagtaagagagagagaagagagagagtgatagagagagagatgagagagagtgatagagagagataagagagtggaagaggagcatgacaggtgggtcccatatttttttataaataaaatgctgacgggactgccacgtgcatgccacgtaggtgattctagattgggtcgaagggggtaatttgactgtattgaaagtttagggtgaacgatgtcttgttttcgggtttatggggggtaattcagttgaccgtgatagttccggcggggggtgggggggggttgggtaattcgtacttgttccaaactaaaatttccccattccaacgtgatcctatattccaaaaaaatataacagtgcagcaacatggctttatggattcgaggtgccatgtcaaagattcttttcatgccatgctctttcgttcccatgcaaggttttccgatactcaattagggcatgagtgctccgctgcgacgcacggtgccccacaatccaataacgacatggtccctcatcatccagaattgctggaggtcaatctacgccgccttagctctagaggaggaggggtagagcggccagtggagtgggataggggagctcgaggagtcgtcggccaccgtcggtggagctcgtggccctctgccaagaactgcgccaccaccgctgctccaagccccgcgcctagatctttgtcacccttcttccaccaccgcttcgccccactagcaactgccgccagcaaaggttgcgacaagcgaaggacaggaggagggggagggaacgacattggcttgaaaccagctgatgagctgctccccgttgggcttgttgctgccgttgacctggtagggggagcttgttgctggtgtcattgccgagcttgctggaccgagccgtctcctccgaactctgcttggtctaaatccggcaagcccacggaagcgggaggggcatcggctaggaaaggaggcgtgctagtcaggaaggaggagaggggcgccggctgagggacagcgacgctggcagggagaagaggtgttggtcagaggaggagctgctgcgattcatcgatggccataggtgacaatgagtgaacgagtagcagggtctatttgggggagcttctggtagctgaagattcttctagaagctacagctgccaaaagctcccctagacaatacagattttcactcagattttgagaagatgtagttgtagaatccataaaataaattaaaagccagaagctaatttcaaaaaaaaaaaagccagaagctgatattccagcttctccagattttcaccggctgattcttggaatcttaacctcccctgtactaggccatagataagaatgaatggtggatggtggtaagagataaaaataaggaaatgacttggtcaaaggtagttgtgccttttgtttttaggttttttttaacaaattctggatttatttataaatttagggtttatgaggactgaaatagaaaattctatgggctgaaactaaacattccttgtcagcctggtagggatactctgtcctgtgggatatgtgtcttattagtgttttctcctatgtagaattgttttctttttacaaagaaactcaattggtgtagcttgcaatggtaatgcccttaggatcgaattagccacatcttaggtcctgtttgggggagcttctcccagctgcagcttttggcttctgctagaagctgccctaaatagtccacagcttctgagaatctatagttacagattctgaaaaatgaactaagaagccagaagctggataagctgggtttcagagcttttccagatttttagaagctggctaccaaacagctgcttctcagaatctaaagctcccccaaacatgcccttagtatgagacaaaaaaaaagcagatggttaaatctccacaagattttgaataagaagcctactatgttccttccgtaaaataaattaaactttcaattatgaatctgagcatacctcatgtctagatttaaggatacaagttattctctttcgaaggttgtatttactttatcttagaaaacggaggaatagaaaaaatataggattctgacatgaatacaaatgtaaaatataggaaaaatataagaaagaccgtttgattaatccgcaagaaaaacaaaggaatttgaggagagataaaggctcaggctccttttgattcaaaggaaatttataggaattttagatgattttatttctataggaattttttaaatatagccctttaaatcaagggaatggatcctatagaatcctatgaatttcctttgaatcaaaggggggctaacctggtatttgaacatagtttctgtataaatacacagcaacaatttttgagggagggagggtgacaggggtaatctagcacgaacgaaaatatacgaaaccccaagattctgatggtgttgaagctgtcccaaatacagaaaaagaggtactgcctgctcagtcaaaaatagggctttgtgcaattatctctcccagtagaaaaagatgcacaaaatccctctcaatcacttcagtcagtcaaatcagcaaacttttagctctactactactcccagtagcagtttggcaaccattgccctgcaagttataggaatgctactcctagcggcacgtatcctgcttgctctgaacctctgaagcctgaagcctgaacaagtgatcgctctgaagccaagtgatcttctcaagatcttttgcacagacacacattccattgttgcagagaagcaagtttgcattcttctgggatacgcttgcgtgtattcctcattttataatcttaattagtactcctattagtactagtattattactaatcgaggaagtaccagtagcctaacctcggttagtgtgtaagtagaatctgggatgacgttaagctgagcatatgatgattggtaatgtgatggtagtagcagtggaagcaaacctttttcgcactgctggacaaagaagcaagccagcaagagaatctggtcagctcacttgtctttcatttgtcaaaaagttaatcaactgtcgcctcacaattagggcaaagctaaacttgtctgcacaaacaccaacaatatggttgctaaagataacaccaaactttatgtagttactccataaaaatactccaaactgggagtagcactatctagtctcgtctgttatgtcccgaaacttttcatcaacgaaccttttagtggagaggttgggaacctctttcttagtcaccgaaaacggtgttacccattagcgtgtaatgaattaagtaatagtctaaaaaaaatttaaaaataaattaatatgttttctaaaataatttctatagaattttttttaaaaaatgtaccgtttaacggtttgaaaaacgagcgcacgaaaaacaaagggtgaagatgggaaagtaaggaaaagaaaacaatctcaaagttagacctcaaagtgagtctctataaacatcagatcagtagtatacacagcagggagtgagctggttattgcacaactaatgttttaccactccgaacaaagtattggcaatttctgacgagatgaacaacaagtacagtactaactagggcacgtaccacaccaactctgcaattattatcaagattgaagggacaaatggaatcgcggatctctactttgaaagaaccatgtaaaaatgtcggagtcggaaaatacctactaacatatggagtcttttttttttgagagagaaacttatatggagtctcatagtagtactccatatcattctcatgtatgatcacattgtgcaaactttgcaaaaaaggaaaataactaagggtgtgcttagctcacgccaaaattgaaagtttggttgaaattggaacgatgtaacggaaaagttagaagtttgtgtgtgtagaaaaattttgatgagatagaaaaattgaaagtttaaaaaaaatttttggaactaaactcggcctaatgacatgtactccctccgtaagaaaacccactcctaagtatgcaggagttttttttttttttttttttttacagagagagtagagtacagtagaagagtaacattctatcaatcctatacttcttttttacatctatctactccctccattttcgtgtacctaatgctggtagtgcatgcatagcctctgatcatgacgaacaattgacaagaaccgcccttctttccacgagaacaaaagttgcagcagtggacaaacgagccatgcgtgcgtgcttcgcatattcatatcagcatgcatatgcatgcgtcttttatcgcgtcactttccggagtccgaaatatgctaattgctgggtaggcgacctgaacctgatcgatcgattgaaaaccagttaattaacaccggacctgtgcagctttgggggcacaggataacccacaccatggccctacatgtttgctgttgatgactaagttaagattggttaattaattattaatcagtttggtgatttgtcaagagaagaccaaatcacgcgattcatggctgaaatctgaactgctccaacaatttcatgaatgcaactttggatagatgattattagtagtactatagtacataaacattacgcttttgctccttttctaagtgaagacatgccgacatttttgtcataagcatgacccaaaaattagcggcatatagttgatggtagttttagcttgacccattgatattgcttggaataatgcaggaacttcagagacaaaactatctgaaatggaactccagctgagtgtttattccacggtgtagtatagtatattgtagtacagctacttgtgcagaggccttttatatatggtctctatgaggtaagtagtatgcgtgaaaacggatcagatagtttctgatcgacccaaacaattcttagaaacagaatatattggcttggatagtctcggatttggaaacaaattcagaagtgctaagttaacacgatgtattataaattagcgtaagaaaatacggtaaataccacgtagtttcacctcaagcgtgtaaaatggattgtttgcagaagtgtcggctgtaactctgttcttgacttcttgttggacaggaagtgccaatgtacgtatcatgcacgggtagtggccagacacttcattatggatgtgtttggttgcacgggtagtggcctaacccagttctcgactgagtttggtccagataaaacagaaaatctatagaactacataccgtttgaacggagtagagtaatgatcaacgccctacaccttatcttcttgactcgtctatgcagcgtcgtccaccacccaccacgcacaagttactccctccatcctctgtccccctctctacgcccacgaccactagccgctggccaccgggagccgttttctcgccgcatcgaccgtaacaccatctgagccggccatcggcgatgtccccagcaattcaacatgagtgcaacaatggcagagcctgcatggggttagatgtccacaggaagaaggaagaatatgaggatatggcttttctagtagttcgtcgcctgcatctactcacaatctcatctctttttattgttcttgttgttgctgttgcttcgatttcatgctaaggaatcaacaggtggatgaggatatagtgtgttggagagaggaagaagatgacttatttggtacaaaatggtacctctgggtaccaggctttgatatattttttttgttgttaccaagcctaatatgcaactacaggtcttgatacctcgtggataccagaccaggtaccaccaaccttagaaccatgggtaacagcccatgtctgataccccaaatactgaatctaatatcctaagtatcggatctgatacctatggtaccagactgataccttgggtatcaacccgatctggtacctcagatatcaagtaccgataccagaccaggtaccaccaaccatagtaacatgggtaccaggtctgatacctcaagtatcgaatctaatatcccaagtatcggatctgatacctatggtaccagatccgttacaggtaccaaccaaatctgatacctcaggtatcattttcaagatatgggtaccaactggatctggtacctcaggtatcaagtaccggatccgataccataggtattagatctgatacggataccaactagatctggaacctcaggtatcaagtatcggatctgatacgggtaccaaccagatctggtacctcaggtatcaactatcagatctgatacgggtaccaaccagatctggtacctcaggtatcaactatcagatctgatacctaaaagttgtgtggggactcaatgcgagtgcatggatgtgtgggggagcgcaatggacacgtgaagggtctgggagagcgatgcgtacgtgtgggaggaagagatacagacgcgtggggacacatgcgcatggttggtgggggcaacgactcatcattaactcattataatctatcccgttacacgggataccgtggtctagcagttctccagataaaaagatacatataaagttgtttgtttccttgtattgattttgtctggttagtatgagattttgtttagttgcataaatgagagatacggtttagaagatgtttttgtttagttggttgtataaatttgggtgtagttaattctttatttagttaggtgagattacctcttcaatgttatataaaaatattgagagttaactagctagatatagacaatttatcagaacaatattagtgttcaaaaccgtgagaaaaagaagaaattagctcaaatatgatcgatagtaactgtcctatattgacggtacgctgatctctcggtagaaaaaaaaagaaaaaaaaagaaaaggaaaaaagaaaaggggaacgagcttcactcgccgtcgctcgctgctgcttgtgcactcacagactcactggttatttaaagagaccatcgaagcagaacaaagaaaagttacaggaacatgatttgagaaaggggattgctatatagcattcgaatgaaatttggggataaaaaaatgtagtcaagttttttgcaggaaatatcattttccaatgaaactattgagttcctttttgcgagtaaaattaaagacttctttatttgcaggtaatcaccgaggcttacaaatttacaatacaattgaagatcagaactagtcacccttccttgatgaaagagtaattttacatattgcatttagaaggatagcatttccttcaatgtagagtctccgagcataagagcagcagtgcgcagagcttttgaccagggttgacaataacagtggttactgcatggtcagttactgcaggtgttcggtttggtaaaccgttggtatatggtttgataaaatttgtttggactaaaatttaaagaagatcaaaaaacatatataagtaaaaaatcagttctagtgctatctagtaaaaaaatcttgtgtgaattactaaagttaacttaattttttcgagctaaaccaaaatggaaatagaaataggccaacctgagcactactcatgaagcccatttaggttaatcctactttgtaactatgaaagggtaaaattatcgcagcttgtgctctctgtcttttgactcattggcagtgtggaaatttggcatccagtttaatatcaaacagtgaggctcaacttgtgttttgaactttttgtgaaaatatagtacatagaagttgttaaatggtttccaacaccaaaaaagatccatagtttatcttgtttggaacttcagaatatactccagtaatgtatggttgccactgtcaaaggctcaaagcgcttggttgcagagtgcagagacttttccccgttttctcagttcctttttggtttggcattgtgctctgattgaacaaccaaggctgtaatattttttccaaacaattttacgacaacagtgacaatgtaaacttcatgcatttgctttcacctatcaccagtcaccctacaggtaaagcagaggaaatggggaaaatataaagggaaccgagaaaaaaaatgcagtaataagttggtacaaattatcattttcaaataaattaaagagttcccttttgcgagtaaaattaaagagttatttctttgcaggtaatcacttgggattgcaatactcaatacagttgaagaccagaacttagtcactcttccttgatgaaagagtaatagtcactcttcaatttagagtttccgaacatataagagcagcattacacagccctttagacgagggttgacaatactggaggttattcagttactgcgggggttcccctcaaaaagataattactgtgggggcttggtagggtaaaccgccggtatgatttgttaaaatttgattgaatgcaaatttgaaaaagaccgaaaaaatctataagtggaacatcaattctagtgatatatggtgaaaaacttgtgtgaaaaatactaagttaactttattttttttcgagccaaaccaaagtggaaatgaaaatagaaaaaaaaaaggaactcgagtaggccaacatgagtactattcataaagcccatttagacccaacagagagatatcttctctttcactcattcactctctcactcaacaaaatatttttctgaaatgtttaaaactttttctaaggttttttatatggtttcctttttttgcaaataactcttttaaaaaatagtattatgattaccgtggcttaccaagaggtaactttgggttagtgcagttaccatgaccaatggctctttagaacaaagaaatttaaaaacaggaacatgaaaaatgtagaaatagaggtggcatatctagttgatccttaggaattctaaaatgcaggaattgtgcaaaacttgttgcttggacgctccataagaaaagtacaagatttttggagagatagaccaagaaaagtttctcatgaggtccaatctcatgttaaaaaacctccaaatttgctatgaatcaagtcattccatagggattttgtgggaatttcaagtgcccattcctttgtttcaaatgagcacttaggaaaaatttccatagaatttcaatcctacaaaaatcatcttttcctttgttacaaataagccctaagagatttgaagatgaatcttgtgtggtcttgcacggtaactgcatggttgctgtcttggtggcggtaaaacccttacatgccggtaagggaacccagctttatggcatacttaatattgcaagcttgagagcatataattatgagtaaattccagaaaactataactatgatagtttgctataacattagtaacctatttcagtttgatgcaacaatagcatgggaaattatcataaaactgtaagttttacgtgatatgctgctacatgacaaaagttgtagttttgtgataatttcccacgcaattgttgtagcaaactgaaatagatcactaatattgtagtaaactgatagttttgttactatagttgcagttttttgaaatttactctataattatactatacgatttccattcctgcaaatgattttttttgttgaaactctgtatactaaaatatatgagtgtaagtaaatgtttaagaatttgtatttttctcatgaataatagatgcattatggatccttatttctctctaatatatcataaacaccaaggccactgccaaattataatttgcaactacgaaagttttgggttggcattttcaaaatgaatgagaaagtaacacaggtaccaaattttacactgtaggattttgtacctcttagtttttttttcaagggccataaaatttctcttacaaatatctgagattttttgttttgcaaggaaaaacagttggatttgaaatttaagtcacaatcaagttgaaatatggttttctacatgaaattttttatttttctacttcaaaatcagttcgtcaggttacaaatataaatgcaaaaaaaatactagctgaaatttctacatttttttataaagaaaaagaaccgtctagtttggctgcggaattgacctccccctaaaaaaaataaacataaaaattctgtattttgcgagggtaaaacaggaaatttgacaggaaacacgaaaaagaacaaataatttcaggacagataatctccgttccctttatattttccccatttcctctgctttacctgtagggtgactggcgataggtgaaagcaaatgcatgaagtttaaattgtcactgttgtcgtaaaattgtttggaaaaaatattacagccttggttattcaatcagagcacaatgccaaataaaaaaggccagaattggggagaacacaccaagtactctgcactcagcaacccaagattcagctttgacaatggcaaaaatataccacaggagcaatctgaagttcaaaacatggtaaaccatggatatcttttgtgttggaaatcattaacaacttctatatacaatatatatttccacaaaaagttcaaaacataagttgagactcactgtttgatattaacctgtatgccaaatttccacactaccaaacagtcgaagacagagagagcacaagccgcgattattttaccctttcatagtcacaaagtaggattaacctaatcttcattcttttaaacctaaaatctacaaatatttgtatacagagtgcaaatagccaaatgcactcttacactaaacaatccataaaaaaaagctcatatacatagtacacaatacaatttccagcacaagcaaaatgtattttttactcatggctgctgtttggaagacgacgaccaagtgctcggatctttgcgagaatacatcgacggtggaggagatggatatggcgggaaaagcggcgccaatggcgggaacggccacgggaacgatggcggcggtggcggcggcggcggcggaggcggaggtggcgatgggtagaatgatggcagcggtgggaagtgcgggagaggcggcagctgcgggaacgggaacgggaacgccggtggcggcggcgggggcggtgacggcggcgagaagattggcgggaggtgcgggaacgggaacgccggcggcggcgcccacggccatggcgggagcgggaacgggaacgccggcggcggcggcgacggcggcgtgaggaacgggatcggcgggagcgggaacgggaggaacggcggcggcggcggcgtgaggaacgggatgggcgggaaccacgggcgcggcgtgcagaacgggatcggcggccacggccacggcgggcagtagaacagcgacgtgttcagcgcggcggggggcacgtcgcctccgccgccggtgccgccgcactggccgccgttcttggcgccgccggggcggtagtagagggagttgaggttgtagaggcaggcgttgggctggtcgtggtcgtggccggaggaggaggaggagatgtggccgacggtggtggtgaccgccggcacgttgcagagcggcgaggggttgtcgatgacggcggcgcggcagaaggagtcggcggcggcggcggcggaggtggcgcactcgaagccgtcgatcgccgggatgtcgagctggtacgcgccgaaggtgttggtcaccttctcggcggtgatcttgatctcctccttggacgccgatttcacgctgatcatgcagtcgattctcactttgacacctgtgatgaacaaccaagcaattcaacatcagattaattatctgcaatttgtattcgaccggattattaaatggttgattgttgtgaggtttttgggataatggtattttttttgagtagctatattcatgactccatattttttatagaaaaataatcagtatatatttgtacattgcaagtcaccaaattacatatgcaataattttagtgtatactgtaaaaatgatttaactatatttgtttgaaacgtcataaatatagccagtctgtttttttacaaaatggataaaatccggcccctgcatctattacaaaatggataaatcggatatgtgaaatattttctattatttttagtaaaaggtaccataacatttcctaggttccaaacttagcaccattctaaacagtttaatattgttatactgtaaaccttgggctacttggctaatatttattttggtgggatgtgcaagtagcatgtcagtgcacacctgcagattgcaagttgtttatcatactacgttctctaaaattattacgaaaagtacaggagaaattccatacgtgacagacacaaactaataaaaaacagagctcccaagttccaagcttcttccaactaatggaggaaaaatagattgttcagattatatccaaaataaacctactgaaattttgataagttgataatattattaagttttgataggatagccactaatgtgtagttaccaagaaattttatcaaaatttcttgtgtatttaccaaaatttggtaaaaaaataaatgtatgtacattttgaacaaatttataaaaaaatgaaatggtttgaaatgacatcaatcagaaaaaaaaaagggaattttgaattccaagaaacagattatgtccacccaaacattccacaaaggtttagaagaatgaaatttctgacaatagtcttctaccaaaatattatcagaaatctaaacaacaaagtaatcctccaaaattaattaggggacacatcaccattgacttcaggctgaatgcctgatgataactgaagtacagtagtacctggcaagaagtagctgtggttggagaaggagctggaggagcaggcgtcgcagaacaccgtgccggtcaccgtcaggttcgccgcgccggcgccggcgccgccaccgccgccttcaccttgagtagagctctcacaatgtgcaccacggagaggaagaagaagagcaatcagtatcacctccaaggaaagaagaagcaacctcggcttcttcatggtgtagtgctcctccatcttcagagttcagacagagctcgagtggtgagcttctgcaagagctggagaagctgataggcctctactccagctttatacccaaggtctatagagtgtagtagcatgtccatttcaggctgagtttgtgagagtggcatccacaaacacaaagacaaatgtcctgaaaacccgctcgctctcgctgacaggtgggccctgtatactccggcacaatagagaccccacatgtcagtgaccgtcgagggaagaatacaccgaaaacccggttgtacgcgtagcgaaaacctaaactagtggttgggagatgatcaaattaagggaaaatgtgtaattgagcagggcattgctcatgcatgctgactcctgaggccagagagaaagggattgggaggggggtgggacacatcactccaatccaactcacatgaaacaagaacatgtgaagggcatctggaccttttgtgccattgctctagctaccaattaacaggagggtacaaaaactcttgaattctttttcagggtttcaagcactctctctctcacacacacacaaacttttgtcacgggctctacccgtgagaaattttgaaaaagaatatttggatccggtgttctggaagcatcatcgtttggaatgtaccgtgacttcttagttcttgcataggaacagttggaaagggagacaaaggacatggaattcatggtgacataggttgtactagtagtagcagatatacctcgaagcttgtgacttgtgagttgcaattgggcagaggaagaagaagaggctggaccgcccaaggagaggatatttttttgtggagattttatggagcaaacaattaactgaagcatgtatgggagatccgtgacattgtcccttgtgacagagtggcttgtgtgttgttgtggctgtcaaatctccagaggatgaatcctccgtatgctgcaggatctagggcgtcaggcgttgggaaacggtgggttaatacgtgatgtgttcagcaaactcgcccacagttttaggctttcaccttatagcaggctgtgaaattgccagtaccagagacacacatcctacccatgaggcctgtttagatcccacctaaaattttacatcgcatcgaatgtttgaacacatatatgaaacattaaatatagtctaaaaaaataactaattgtaccgattgcgactactttgcggacgaatcttttaagtctaattgctctataatttgacaatgcggtgctacagtaaacatgtgctaataacagattaattaggcttaataatttcgtctcgcggtttactgacggatattgtaattagtttttttttgttagagcccgaacaccccatacgacaccttatataatacccgatgtgacacgccaaaactttacacccctgaatttaaacacctcctaactggagaggaattgggttttggaaaggtttcttttttctaatttgaataaattaaactgtttgtactttgtaggaagtgattctcaaaccaaaaggagaccttaaatgtcgttctataaatgacaaaatgtgccatcacagaggtcatgtcacgtcgaacaattacttaatccatctgttccataatataaagaataattacttaatccatctgttccataatataaagaattttaggtggatgtgacaccatgtccatatttatagtattagtatgtataatatccacccaaaataccttatattatgggacgaagagagtacaataataaggttatgatattgtcttgtaaaaagtattgtgtagttcctgtgaactgtaatcacattacaagaacagtaaatatttcaaccggtatgtaagccatacatgtgaaagaaataaatacaagaacaacaaatattccaaacggtatcactctttgtggttctacagtttttagacaaagattgagaatacaaagatggctaggattcactattttgaaacacacgtatagaaacatttcaggggaccgaaatactaagggttgtttggttcctagccagactttggcaccacgtgcaaataaaaattgtcacacttgtctaacatgaggtgatcaaattcttgatcacgccttagcaaacctaggagaattttgttacacttttttttaagtcattgacatttgagacctaatatgatgataaggaattttaccgtgactgtggcaactcaactaaacagttgccaaattagctaaacttgcctaaccttaggcgtggtagactgtggtaaagtgtggtgtagtgtatagctagcaaccaaacatcccttaattcttttttttcaactttaacgaatttccacaggatttggactttttttgtcaaactaaacaagtccaaattttcagagcacattatacaggagccattgaaagcccaaactttcaaaacttttcagtccaaaatcaataaggggctgggggacaccagcttaaaaaggaaatcacactgaagttatgttgtacgtcaattgaattagttatctgcgcatttcccttatgtgcattgtactactcttgagagtgataataccactccatgcaaaaggccatcaccacgatgctaaaacagaatatatatatgcgattattcagcacgatggactgctagtgcctttaattgaaaaacaatttaccaatttcttgaaagcaacgactaacttagttactaataattgttaatttttaggaacaaaattacgcccaacaacttacgaaacttgagtatacatgccaagttcccaagcaaacaacacgtaagctgtagccatggttgcaagcacaccagctgaccccacctatcagacacacgagcccaactgttagaccatagacatcacatcatgagcgtcagggtgaccagtgcccaaagcctccgcaaagaagagtttgccagcgatggtggtttggtcgacgactaggtttatgtgtagaaagaaatggtctatattacctatagtggcgagataacatcaaacgcataaacagtaatatagacttttttatagtgcttgctccgtagtgccgagacaacatcgaacgcatgagaagacggggatgaagaaaatggtggacctctgcatgctcacatactaggcctcattgcaatgctggcagtggtgagggcagtgctgctggtggtggtggtgctacgtacacgcggttggtgagctacatgctcaggacgggggcaatagaaagtgtcatctgtgaccgcccttttgtctgttggagttcgttgacgcccatctaaaactataccgttgatcgcagcgcaaccgagccattatccaaggagagataggcgagaggcaaggatggatccagatatatgggggactcatgtccttctttctccttcagcccccttcttttcctcccctctctccttctccctcctctctctccttctatcaatggtgatctcgcggtgtaggggggctcgagtcccctagcacccacgctggatccacccttggtgagaggtgaggaaaaaaataataaacgtggctacttttatgtgggtctgactatatgttttatttcatgcaggatgaaaccatcatcaaaaccatttgggaaggcaaattgaaccggtattggtagctgtaggaggtgttatatatggtatttcaattgaacaagggaaattgaacttgattcttatatgagggagttatatagactttatggtatgtggactgcttcacatctctactggtggcccacatgcttgctggcttgctgcagatcgcaacttgactcccaccacttcctccccctcctcgtagttgtgcggagcggagaggaccgcatcgttgttctcggcggtgttcccactgatgcgatagctacctctcccctttctcctacgccaccaactccgtccccacctcttcctcctccttgtcgcgcgggactgagaggaccacatctttgtgctcggcggcatccccactccactggaggcgggtgcatatttactgtggtgcagcggctcctgttggcggatccggcggtggctgcttctcccatgggcggatccgacgatagctgcagtagcggatggccgtaaataattgtaattagtaaagataatagaatatgtgtagaaattaaattagagatggccgtgattaattgagatactgagtaattggagaagtgctacacaaaattcaaatgccgaaagttaacgtattatgccgaatttttttttgcatctaaacacatgcagctccaaaattccagatgtgagcacgtaatgtttgaatttctatttctaaacagcatgcttgttagaccatgtcaaatccggttgagctgatgcccaacgaaataaataggatgtatctattattattattattatatactaaaagtccattaaacttcctacaaacgctcttaagccgccacatgtcatccctacaaatgttcctaggccgccaagtggtgctctaataaattagagaaattctaggaaaaaaaataaaatatctaaccattgattttcatttaatctgggggacccatattttctaaccattacatctaactaaaaaataccaaatagatttatatttagaaagcgccacgttctatatcgatccatccgtacgtgtacgtgcatgtacgtatataattcgtacgtacgtgtccccccttcccttcttttcttttttttctttttttcactcatgagagataaaaaccaaattaataatttcagctaatagttgtaaaaaaatataatgttatttcaagttgtattctacgcacaagtccattaaacttcctacgaatgcactttagtcaccacgtgacatcctatatactctcctaagctgtcatgtcgcactctaataaattagaaaaaatctttgaaattatgagaaaaaagaaaaaaaaatctgaccatccgttataacttataaaccgatgaatctattatttcgaacaattagatatatctcaatgaatctattatttctaacaattagatatatctcaaggatctgttttcaataaaaaagaaatctcctctctctatatatacgtactcctctctctgtggtaagtacgtgaatttcctactttattgctagcaaccccatataaaatcttaagttactaaattatactcactctgtccctaaatatttaacaacgttgatttttttaaacatgtttggccgttcgtcttattcaaaaaattttatgaaatatgtaaaactatatatatacatagaattcaaatgataggaaaagaattaataattacttaaatttttttaataagacgaatggtcaaagatgacttaaaaaaggtcaacggcgtcaaacattttgaaatggagggagtataataaaccataaagatgcagagaaatcaaaacgttgaatatgttttcaacgtgcgtgctgcttgctttaatgtggttatccaaatagactaacctattcttgctagggattatcaatgcaattagcattaggtctgctacaaatgagggtgtgcacatgttttcatcctgctaagctctactagatttatcttaatcatcaaatttgcgaacatatttaaatttagatccatggtgtctttaaaatacttaatgattcaaccgtggtaaacttctacggaaaagaataatttctagggcatgtcatcctaattaccatttaaaaataaaaaaaattatatactaaaggtatacaaacactcctatactaccacgtggtacgcctataaacacaactaaaccgccacgtggaattataataaatcggtaaaccatctattttcgactattagatttatcttttttttcttaaaaaaaaccacaatccacatccatcgcctgtctcccaccggcataactctcctctccccactggcccacccttccgaccaccccacgcatgtaagtatacatatatacactttctccgtcttcaataattctttctctcaccttccttttttataaataaaaaaattaattataaaaaatattatgaagaaaacaaatctaaccatcaattttcaattaaattgttggacttataatttcatcaattttcatttaaatcagtggagttataattttaaaaattggatttaaagacataaataattcaaacagatgaacgcattaaatctacctcaataaaaaaaatctccttaccaaataacaacaaaacattaaaaaacatgacagcgcatattagatattcttgaatcgttttacatagtaaagatcaattaaacgtgctctatagcactcttaagtcaccacgtatgatattttaaaactttgaaaaaaattgaaattcaaagaaaaaaataaagtactccctccatccacaaaagttagacatatttcacatttgagtttttccaaataagttgttcctatttatagtctttatgtatttaagacttaaatgaagagataaattaaagggtttgttggaaccatgccaccctaattttgcaaaatttgatatatgccacccgtatctcaatgacatgtaggtcccacataagtcaataacatgtgggtcagggtggcatatcataaattttgcaaaatttatgtggcatggttcaaattttccctgaatgtttgattagaaccggaggagtcatctaaatactcattagttgcatacttgcatgcttgcatttacaccttgattttataacatccaagatgatttaatattttcttggttttggtgataaaagtaatatgtgtggatgaagggagtatatatctatacattggtttccacttaatttgatgacccattatttttaactattagatcacctttgtctttataaaaaaacttaagccaccacatgtcttgtcttaaagatccttacaatgagaaaacaacatcataggttctcacttagattgtttacaaagattgaaaaaaaaataatgtaccctccacctgcctctccaatcacatgcacataacactattacactgcgaaccctttcttatacctgattcgagttctatgctattcgtttttctccagtctcctccctattttcagctactaaactaaagagagaaacaaatattaaaaagaccataattttaagctacacttataattttattttatatatcatctaatcgatttttgatgatggtttcttttttatataaagtctctacatgttaccccataaatcctcctaggcgtttttaaactgatgaacccattatttccagccattagatttatctcatattaaaagacaagtgtgtattcataatacatcatcttccaaaataatatattgcacaactatatttcttcatccaatattattcatgctaagttgcatggagtctcacccacactctacatagaatgttcacatatggattctctctcaaactaaacaataatattagactatataaacccatgcatttagtggagcctcatatcccacccaattcatccgtcaacaaacaatgacaacctacattcaattaaaaaaacaccttacttttgaatttacacttaatttgcaatacatgttttctaacacaaaatatgtctacctactttttagatgatgaagaatattataaataattgcttgtagggattaattaaatatgacatgttataaaaataactaatagctaggttagaaaattataaagcaatgctaatgaaaacaatttttggagaaatcatatattgtagatgctcaaacatagtctacgatacatgcccgcgcattcgcgcgggctatcttcctagtttaactaaatgtccatgtaattaatgggccttttggccttctgctgccttgtttctagccgtaacgtacactactagcagccccagtagcatactccctccgttttataaaaaaacaaatctaagatcgaagattagatgtgacatatcttattattatgaatctggacaaatatatatctagattcatagtattaggatgtgtcacattcggtactagggtttttttatgggacagagggagagtaagtctctttttttttttcagccaatcgaagttgtttaatatttttttttgcttactatgaacatattacactaagcagatggattatatttggagctcaccggtcacagctgcctatgcagatctaatttccaacataaaaaaacaatatctaaactcagggaaaatagtttgttggattagtaaagagagagcgatgggggtcaaagaaaaattgaggctaacggcagcacagcggtcggcagatttgccctattttgcttgcctcccgtaatggttgggggcagctaatgggcgggtgatcccccatcccctatacactattttcttccttcctattccccttcttctcttcctactacatcataaattttttaaaaataaaaacacaaagttgaaaagtatttatgtatagaaatattatatataaaaaaattgaatcaaatttaaacttaaaacggatatgtaaactttttactataaactttaggcctataaactaatattagaatttaagtttaaatttgaatcaggtatgtaaacttttgacttataaactttgggtctaaaaattttaagtgtataaacttcagatctatagaaatactatatataaaaaatatttaaatttaaattcaaatttaaatagggtataattcaaactcaaatttgaatcagttatgtaaacttttgacttataaactttgggtctataaattttaggtgtataaactttagatgtatagaaatactatgtataaaaaatatttgaatttaaattcaaatttgaataggataatttataaactttgggtctctaaactttagatgtgtaaacttgagatgtacaaattttaggtgcataaatttactacttcctccgtttcacaatgtaagccattcaagcattttccacattcatattgatgctaatgaatctagatatatagatcccacattcatattgatgctaatgaatctagatatatagatctatctagattcattagcatcaatatgaatgtggaaaatgcttgaatggcttacattgtgaaacggaggaagtaaaatagaaaagtaatgccgtgccaaaaaaagaaaccacgtggaggtggagaaaaagaggggggggggggggggtgtagaagtagcgaatttacaataaattcacaactgttgcaattcgctacttgcaaatgctccatccgtgtccgactgctactcgaactcgatcgatagctcgacaccatatagcccgccatccatccaattccatggccacgcaaaaagcgatcgatcgagcagttcgacaccaaagctgctcatcgatccccacatggctaccatgcaacaacatcctcctccgccggacgccgccgccgcggcgggatcagccgacgacgacgactgtccggcggcggtggcctacatccgcttaatcgcgcaggagttgtgcaactgctggcacggcgtggacgccaccggcggcgacgccctcagccgcctcctccaccgccgcccgcgcggcggcggcgtcacgttccccgcggccgtcgccgcggcgctcgacgacctcgaggacctgtacgccgaggggagcgcgccgatggcggcgtcggcgcgccacgcgatccgggagcggcgggcggcgcacgtggagcggctgcgcgacgccacgtccaggcggctgtccgtcgcgcgccgcatccgcgacctcggcatggacctcggcgcggcgagcggcaggttcgaggaggcgcgcgccggcgtccggcgaacgctgcggcggctcgccgtcgtcgccggtggcggcggcgccatggagcacgccgcttccgtggcgcgcctggtcgagctcctcggccatgggcagggggcggaggcggctctggaggcggccatggaggcgatggaggcagactatgagcgtctgctgcagcagcgcgacgccgccgaggcgtcggagctcgcggagatggcggccctggaggaaattccacagctgccgcgtgccaccgaagaagaagaccagctaacgctcgaagctgctggccgcttctgtgatgatactgctgcgcttgtcaattttttgtgaagtcgttgtaaaatacaacctccattttcaaatgtgtatatatagtgttgtaacgtttgaccatttattatattttttaaaaaatatgcaaacatcatttcttttgttacttgttttctcatcatcgtgtctctgtgtgtgtgtatatatatatatgagctccactccggtacactctacttgcagtagaaattaatctgaaccgtggatcatatttgatcgaaggattgagatttatttctactaccaccatacttgatgggagtagaaatgtgtaggggcattattgtccatataaaataatgtgcggaggggtataatcgtaattttttgtttgctagccctagcagacggtcgattgtattctgccgtcacctccaatcgcttcccacgtctccgacgctcgtgcccctccatcgccgcctccaccgcccgtcctccttcctcttcacatttgccgcctccaccaccctcgcaggtcgcagcctccgacgcttctcccgctgccgccgccgccgctcgcctccgcattgcacaacgcctcctctgccggcaggtgcagcactgcctttaccgggccgtgtcgcagcccctccgccgtcgggcttaggggctaaggctggcagccaccgtcccccgatcccatagcagcgttaaccctctatggccggcactaaagcagcacctccgtcgctgagcagcgggcaaaatgcccatcaccacggagtaatttttctattcctgtcagtaaatcccctctttcaggctttcttttttttttctttttgaaaaccaatcctcttcttcaggctttccatgtttgatctgcattctatggtctggacatgtgtgatttgtgcatggttattggctgaaccacgtatggtcaaagatctattaatttgtaatttgtttgctatatgtagtcttacacttatttatgccctgttttcacacttgttttctcacatccctagagttgtattagatgaaaagagatttgtaccgcaacaagcggttgaagaatcaaaggtatgaaacatccaaaagccctgtaataattattcctttcatatatctagtaatgtatgacttcatttgcatttgcttcagcagtatatttgatgacctaggaatacaagcatgcaaataatatttatcttctctccggtattttgatcttatgtgctatctcttgattttgcaattagttcagttctcttgcatgccaagctagtgtgcagtgtaccagcgatgccttatttgagttctgcttaatgaacaaatacttttgttaacggagattaatagatcccttgctagctgtgtatgtttttgaattgtcagttgtttttatcaaccgagggacattgttctcgggacagacaatatatgctctagaagtctattacagtgatttctgaatatgccgccgtcttaaggtaactatgccgcaaccctgtactgtgtttctttggttgttcttctctcatttacagacagagtgattatttattgggcccttctgtttgtttgttcacgccaaatgtctttcattgtcacactacactggccaaggtcacctgtgacgggcccaaaccctcatctttgacggcttcgcgcatggtcagtgatcagtggtcactggtgagtccagtcacctttgacgggtggccggccgtcacaggtgacacccacctctgacgggcaagttactagaaggccgtcagaggtgttggtctccgctagccttgagcgagttaggacccgtcacaggtgactcatctctgacggccctttaaataaaggccgtcagaggttgaggtctccgtagttagaagctgtcacaggtgatctacctgtgacggccccaaaagtaaaggcccgtcacaggtaggtcacctctgacgggcctttatttgctagtccgtcacaggttatgttacctttgacggatttttgttctgacccgtcactgatgagttaattccagaaaaaaaataaatgctaaatattggctagcctcaggatttgctagccatgccctctgaaaaatagaaacatcacagatatattccagtcacagatccatcacagatacatcacccccccaatataacatcacagatccccaacaacacatatatgcagttcaaatgccacaattttgcacagcaaattcacaccccttgaaagccacaatttcggtcgttgctcatagaaccgcatatatacttaccaaatggattaaagccatgatgtcatcgacctgcacaacctgtcaataaggaaaaaaaaaaggagaaaacagatgagacgtacaacataaatcgtagttgatcaaatgtgatgacaatttagtaaagtaccataaatattgcacatatgaaagtaaattacattgcactctataaaaacataattttttacatcgccagaaattataaaaacatcttttttacatcacaataaattatctagccaagttcatgagtctatttggcatgaaaacgtcctttcttgttcattatttctgcaagaataaaggcacacaattcgtctctgatagcggggggttgatgggtgagatcttgaagccagctctacctttctgtttaataaataagaggttaattagcacgttttgaatagcaatgtagatattgaaatgagcttattcgccattagcaacaacctcagggtcgaaatctttcacctctcttagaagtgttgacatgttgtggcacacgtggaaaccacattggtctccgatctgttgtgcgcatgcaaacttggtgtcatgataaagttcgttcttgccctccttgtgcctaccacccttttccacatatgggccccaagccatatttaaggccttggtgatttcactgaaatcataatctttggacttattggagttaaggtaggtaaccctactccacttaggtacgatgactaggagaatccaatgtcgcctgcgcagtggttatgtagcgttagtactaagaaccttaacttcaaaaacaatatacacgaagggtattgtcctcttactcttggttgtgtgcgcacatgatgtactccttgtcttgatgggcccataaacaccggttgacatagtcaaccacctcagtggagctctgttgtaaattaacctcattcaccatggatggatcaaggaacccaacctgattaccatggcgacgactctcgatccaacacaaccttaaaatatttacgtattagaactaatttaattaggagatatagtccagtcatatcacaagtatagaaggtatgcacttacaaggagtagcattttagaagaccagtgtccaacttccggatcctgaaaaggtcgaagaggtcatcaaagcctatagttatataggcaggcgacgataggaacggctggtggtcgtgatgtccaactatggatgactccctcattttccgcttggcattgcttagctccatgtattgcttatgtagctctcggcaagcaatacccatcacagctaacacattgtcctccaccaatggcatgcctagctcaaattgggctggcgccctcacgaccttccccgatttgctcaccggcatcgacgtcgcagccttgcccctttttggctccggcgccaactccccgaccttccccttgcctcgttcacgcttctggctcttgacaagtggtggggagctatcggcctttcttgtggtctttattggagccaagctttgagctatatctgccaagtccatatcagctccaccgggagaatgaggtactgacaatgccggtccacggggagcctcaattgatagcttagacttgggaggtgtaagctccgtcggtcgacttggacgaggagtcatcttcacaactatgtcttctttgggccattgtatgaatgtcttgcgcgcatcgcccaaagtcatgatttcatcatttgggggcacgggcagcggatagcctgaccaggtgtcctttactgtatcgatggacaccttggcatacccagctagcaggtctgcgccgtggaccttgtctgtaaccgagggcttgaaagccatgccctcagcgacttcaggagcgaaagttgggtggactctcgctagtaggacacactgtgctgcgccctgcataaggtgaaagtttgaatttaatattggaatgtgtaaatgtcttttattagatatggatcggataacaataattacctcgatgtggtccactgcagctagtggtgcgatcgggagaccaggggccggcacctctgtggatgcacaactactcctatgctgtgacggactcgcgtcgtgttgtacacgaggagttggttgcacagcaggtgttgtgactcggggtatattcatgtcggcgagcaccttgttaaccctttcttccacccttgcattcatgctagcttctagttcttgaatgacctcaaccttaagttcggccttcaaacgagcgtccctctcttccttggagactttccgtttcctgtattgggagctgtactgagggagtccatgcttccagggcacatcgctaccaattccccgagttcggccaggatgttctttggttccgagcgcctttgtgaggatgtcatcttcgcgcctcttcggcgcggactcaacctcgctttgtgaagcttgttcagcaaccaagcccaactagaaaagaagatagtcgtttatacgaacttgtactttatacgaacggaaattagttaggttaagtagtgaactcaccagttcctgatagacgacggcatcacttttgttctcaaatgtgacagagccgtccgggttgaccttaccccttgcccgcgcccagttgcgagctctttgttcagggatgtctgaaaacggggcaggtacattcgctgctgcagcggctgcatcttcttgggcccatattgcctccttgccgatgtaccctgcggtgcccagccgatgcgggtgctcattccgctgttgcagtacgcgatgtgcctcgctggattccctaaactcttgggtggtcttgagagagcagaattcctcccacaccgcttcagttatttgagggtattcatcgaacggcgtatgattgccgggcgggttgacatactcggtgaagagcttcgacttccaattcttccaagctttgcccatcttttggaatgccttccgcttgagcctatcctttgcttcggctggaaatgtgaaccatttctccattgccgtccaagctcgctctttctcggcttctgtgaccttcccgatatctttatggaggatcccgaagttctcacgtgccgctatcccgcagcagttagaccatcttccaatgacattcctgggcgccgtgggcctaccactagcgtcaacctctcttataacttgcactgtggtcggccatatattttgtgaccgcggatttctactagacctacttgcacttgtctcgcccgacatcgacgtatgttgttcctgcggcaattctgcagcacaaacagaaggcaatatttgctaaggggtgctagctaaaatttatgtggttatgtggtgaaaatttatcctataaattaccatgaatttcgggttgttggaccgccgttgtcgcgggatgaccttcggcaactgcctctgtggctgggtttgcttcttcctggatcctcgcaggtgttggggagggcgggtttgcgccgggcgttgacatggtttaactttcacgaaaaagattataaatttcctaccattagactaaatagcattagatccaatgtaatacggggtatactatgaaagatatggcctcagttttgctgagaaatatgcatcaattacaatcatttgcatgaagggataaaaagagaaaatcataacatcaaaagagcaagtgcagaaaatctgttcttatgcataaaaaaagaacaagtgtagaggtatataaccactgaatcaatcatgcaaatttaaaaaacagcagcagcaagggtacagaatttgcatgattgacataaaacagcagcaggaggagtatatatgccacaggggtagcaacagcaggggcaaattaactaaaacaacatgtctagatatactcctcttatcaatccagaagaaaagagcaagtgcagaaaatctgttcttatgcataaaaaaagagcaagtgcagaaaatctgttcttatgcataaaaaaagaacaagtgtagaggtatataaccactgaatcaatcatgcaaatttaaaaaacagcagcagcaagggtacagaatttgcatgattgacataaaacagcagcaggaggagtatatatgccacaggggtagcaacagcagtggtatataaatgaacaagtgtaggggcaaaaaaatgaacaagtgtagataatctgttcttattgagcaattcatcactggccatttaataaggaacacattgggcagcagcagcaagggtatataaatcatcaaagaatgacagaaaacaagtgtatatagtctcctcttatcaatccagaaaaaagagcaagtgcagaaaatctgttcttgtgcataaaaaaaaaacaagtgtagataatttgttcttattgagcaattcatcactggccatttaacaaggaacacattgggcagcagcaacaggggcaaagatactcacaagggcagcaacaataggggtgtattaacataaaacatcactggccatttatctagttaaaatcatgcaaaattcaaccaatgcagcaaaattaatcctaaaatcatctaatacaaaaagactaattcatctaatactgcatatatttcatccacaaatagtccaaattcatcacctcatatatttcacatctcaaatatgcatatatttcatcaaaaaaaatgagacagtactactaacttcatgtaaacagcaattcatccattcaattcaatcaagtgtagataataaaacagcccacaatcatttatgtggcagcagcatcaagggtatataaatcatgtatataaagaacaattcatgcaattcacctattcatagacaaaaagggtatataaatccacaagtttagataatctgcaaagttccttaatcatcaaagaatgacagaaaacaaaatgcatggagaattttggtgtctaggtcggttccgtccatggactacactgaccaatccaccaaaattccccatgcattttgtattctgtgatggtttgataacctcggaacaacattaaatctgcggccaatcaatcaattcttccatttgaactaaatttcaaaccctaaacctaataaagttccttaattattaaagaatgacagaaaacaatatgcatgaaaaattttggtgactaggtcggttccgtccatggactacactaaccaatccaccaaaactccccatgcattttgtattttccatttgaactaaatttcaaaccctgtatatgctttatttataggaaaagggaacataacccctaacactgttgccaatctatcaatccatcctttttcagctaaatgcaaacattatccccaaaattcaatagttctagcaaaagggaacaaaacaacatataaagcagtacacactccatgaatggttacatgtcaaaatggcacttaaatcattcattcatccattccattgcatcattcatccaaagttcatcattcattcatccattccattgcatcatttattcatccatccactgcaccattccattcatgggcctcagagagagaggggtacctggagaggagacgacgagcagaggaggcggcacacggcgacgacgcacggcttctcagcacggcggcgtggcggcggcttcttggcacggcggcgctgaggaggagaagagggggttaatcggcagaggaggcggcacacggcgacgacgaggcccggcaggcgcacggcgcacggcttctcagcacggcggcgcggcggcggcttcttggcacggcggcgctgaggaggagaagagggggttaatcggcagaggaggcggcacacggcgacgacgaggcccggcaggcgcacggcgcacggcttctcagcacggcggcgcggcggcggcttcttggcacggcggcgctgaggaggagaagagggggttaatcggcgaccaatagtaaacgaggggaggcggggggagtgggctcaccgtggaggtcccggtcgagaggaggaggcggcggagaggagatcccggtggcggcgacgacggtcctggcgtggcgactgagaggaggtcccggcggccgtcgagagagtgagtgaggcggcagcggtggggaggtcgaggcggcggtggggagggcggcgtagagggcggagatggcggtagagagggcggcggcagagatggtggcggagaggtcgaggtcgaggcggtggagaggagggcgtagagggtggcggagagggcggagagggcggcggatttggcggcggcgagggcggtggtggagaggagggcgcgtagagggcggcagagaggtcgagagaggcgaggcggcggtcgagagagtgagtgagtgagagtgggcgccggatctggatcgatctagaagatgtccaaccctaggtcaaccctagtcaaactcacctgtgacgggctccaactatgtggccgtcacaggtggcctcacctgtgacgggcgccaaccgtggagccgtcacaggtaagaccacctgtgacgggcccaacactctgggccgtcacaggtgaggtcacctgtgacggccctacagatagagcccgtcacaggtgagtttgcctagagcaattttattttattttatttcacttagttcttttattttccttaacatattttcacatacactacatatttttttatacttaattattttatttcactaacagtagtaattgcacttcattattatactactttaattatattatttccaatgcttatacttgcttaattattttatttcacttctagtgggtgcttcacttaattattttatttgactatttcataagcaatatactattgatcattgcgaacatattagagtcatacagataacagacatgtagacataaactacgtacataaattacaaaaataatccttcctcatggtcgacacgtgcatattgaacttcatcttcttcctcctcctcttctagaggtatttcttgacctatgccgtggacgtgctggttgtaatcatcctcgtctgcaatattgtccaatccaacaattctccttttcccttcacgaacaacatgtagtttctttttacacgggtcaactatgtagaacacttgaacaacttgtttggcgagaacgaacggttcatccttgtacgcgttgttagccaagttgacagtggtgaaaccttcattgtcaacttttacattgcgaagatcgacccatcgacaacgaaacaacgggactttgaacttcaagtaatctagctccaatatttgctcaactctaccatagtattgatcacgacgaccaccgtcactagcagcctcgatgcgtaacccactgttctgcactgtgcatttgctgtcttgcttgaccgtgtgaaaggtgtatccatttatgtcatatccttgccaggtggtggcactccattcaggaccctgtgacaaccactgaagtgtttcactaggcaagttctgcaacctggcaattcggttcttcagccactcgttgaaagaagacatgtgcttattcctgacccaactctctgatcggcctgggttctcttgtcggataactgcaaggtgttcgtcaacgtacggcaccacctcagtcatatgctgtagtaccgtgaaatgagctttatcgtacaccttacgatccaacctaatagtctttcttccaacagtaccaacaccgtcaagcctcccttcgtgatgagatcgtggtaatccaattgaagatgtttctgacatgtagtccacacaaaattcgatggcctcttcggtggtgtaactctcgatgatactcccctcggggtgtgaacggttccgtacataacccttaaggatccccaggtacctttcgcaaggatacatctgcgtcatgaatgctggaccacagcactttgtttgcctcacaaggtgcaccggaagatgttccattatgtcaaagaaagttggaggaaagtacatctcaagatgacatagggttctcacaagttctgcctgtagttcatctagtccctcgggatcaatgatcttctggccgattgcatggaagaaggaacacaaccgctggatcgtgtgtcgcaccttaggaggcaagatattccttattgcaacgggcaacagctgtgtgataagaacgtggcaatcatgcgacttcattccaaccaacttaagatcttgcagtgaaacgagcctactgattcttgatgagtaaccagatggaacctttataccactcaaacatgttagcaaatcaatcttctcttctttcgagagagtgtagcaggctggaggaaggtaaaccctgccggattccgtggttatgggatgtagctccgaccgaacacccatatcttccagatctcgtcgggcgttgagaccatcctttgtagtacctgggttaagtagtaatcccattaaactctcgcatacattcttctcgacatgcatcaaatctatgcagtggcgaacttcaagatccttccagtatggtagtctccagaatattgacttctttttccacatgctcctctcttttgtcttttgtttttccacatgctcctctgttttttccttcgatgtgctcttctcttttcgctttccaactttcctcttttttccaaactcgttggttattcccatcactaagttgtgcacctctgtccttgttagctctgtcgggggtccggctgtatctctgtgtccattgaaattctttctcatattcctatacgggtgataccttgggagaaatctcctgtgacccatgtagaccgtcttgtgtgaatgcttcaaccatttgcttcttgtttcctccatacactccgaacacgcccatttccctttcacagtttggccagaaaggttgccaagggccggataatcgttgatggtacaaaacagcatcgcatggaggttgaaatactcttgtgcatatgcgtcccatgttcgtgtgccctcattccatagcctttcgaagtcatcgattatcggttcaaggaacacatcgatatcgttgccaggttgtctcggtccttgaatgagcatggcaagcataatgtactttcttttgaaacacaaccagggaggaaggttatagttaacaagtagaactggccatgtactgtgacgactgctcaaatcaccaaaaggattaatgccgtccgtacacattgcgaaacgcatgtttcttgggtcatttgagaattcctggtaaatcctatcgattgtcctccactgtactgaatctgctgggtgcctcagcatagtatcgactttccgttcttcggcatgccagcgcacaagcttagcttgttccttgttcgcaaacattctcttcatgcgctccgcaattgggagataccacaccacctttgctgggcctcccctctttgacttacttccttcaccttcactctttgctcgtttgtatcttgatgccccacagatagggcagacatccaagtcagcgtattccttgtaatacaaaatgcagtcgttcggacatgcatgaattcttctgacctccaggcccaacggacataatacttgcttcgcttcatatgtcgtctgaggtaaattgttcccctctggcaacagatcctttaacagctcaaggagttctgtaaaactcttgtccgaccagccattactagccttaagcttcatgagttccaacacgcatgacaacttgctgtgcttcgacttgcattcatcatacaacggcatctggcaatcttccaccaacttactaaacttctcataatctctgtcgttgtcctctgcgtcttcaatgtcatgcaacattgtagatagacattgagtgtccaaatctatggtctctccacctaaaggagaaggtacgaacatgccttctcgagctgcggcggtgttctctacatcctgatctaacacttcttcagctgcgacatcaggcgcctcttgctctccatgcttggtccagcaggtatatttcttcatgaatccattcattatcaaatgagcatgcacttcatccttgtcttcgatcatctgttcattcttacagtccctacatgggcacaacatgtgcatgctcatcctactttttctgtcattatccgcaaatgtgacaaattcagtgaccccctctctatactcggtagacgaacgatgcgcatagtacatccatctacgatccatctgaaatcaacaacatacgaagaaaaataaatgatgatcgatatgttgagaatgaatggagaataatgtgttttttaccttaaattttagcaaaaaatcgccccccttgccctcccaaccgatttgtgaacagtacaatggtcgggatggaaagcagttggcagtttgggggtatttatagagccaacacacctcaaacgggttagataaaaaaagcccgtcaaaggtattgctcatacctttgacgggcttctattcaatggcccgtcactggtatccgctcacctgtgacgggccacaaatgaaagccgtcacaggtggcggcccatcacctctgacggcttctaatgtatcggcccgtcacaggtgaggggataccagtgacgggttggaagaaaaactcgtcactggtatacctctgacgggttttcctttcggcccgtcacaggtgagcggatacctgtgacgggccgcggccagatgcctcaccggtgacggcatcccgtataacccgtcaaaggtaacggtcactactgaccaattcgtttgcctgtcacaggtatcccgtcagaggtgtgaggatctggcgtagtgtcagttgtttttatcaatttgatgatatttttcagcacaatgtgtgtgattaatatgtcataatttctgcagaacaaggcagagtgaggcaatacaaagaaaaactttttcagcttgtgatgatattttcagcacaatgtgtgatcgatatgtcataacttctgcagaacaaggtagagtgaggcacattcttctcggacagagaatatatagaagagtggcaagacaaagaaaaactctacatgtctattccagtgacttctgaatattcactgttatatgttctcgctttgttcacctataaatcagcatcttatattatctttggtgcagttaaaacccgtcatgctaacaaggttatggcgtcgcaaaatattgaaaagagaagtttgtggttctgaaagtgtcgatctgtgtatatcatagcttttttggctgaatgtatactacttgttattgcaattgtgaagtccctataaaaaaacataccggtttattcttccgttgccctgtatctatcatagttggattggagtgtttcgattgaaatttggatttaggcccggtccagacagtctcgtttgaaatttggataaaattcatctaaaaatagaaacgattttggatgttaaattatttcaaaaactttaatcgagttgtttatgattaagacggacagtcccatttgaatttcagataaattcggttaaaacgattttgactgagccccacatatgaaaaacacaaatattagcaaaggacataatatcaaataaatagaatgggtgaggcttcaaagttaggcctaacccaccatcttgcggagctagctagaataccgttgggtgtttctcgagtcccacatattttgtgataaaatagtagttctcctctaatctatgtgttcacgacaaaaaaaccacgtgcttttgttatcgacccggcccgaatagtcccgaatgaattttggaagtaacatattttatctaaaatactagtactgctctaatctatgtgtgcactatgaaaaaccatgtgtttttgttggtaagcctgtctggactctggactaaccgaatgaattgcagacgtaaatatttttccttttttccgttgtcaacccgatccagaccatccagatgaaatcatgataaatttggtctgaaattgaaaccgaattttattgtgtttaaaaactttaatccagttttcttgacgctatagcatagcctaatctgacacgttcttttctgatcggacgtacgttctttcttaatcacatacacacctgggcccacgtcattagttggtccacacgagtccgcacaggcccagagtctgcacagcccatagacggacaaaacaactggtgccaaaattacccccagtttatatcagtacattactaatctaccatttaaaataaacggtttagattatttctacttgaagtataatactttcagtaaaaagcaccggagcgtccctctatatatatatacataacactcatggtcgaatgccacatataaaaataaataacgtcgtaaatttaaaattagattgagtatgtattttacttcccttggttcacagaaacatgcatggcgttttgaacatgtcagacatgtaagtcaaactttgaatacaattatctttataaatattcatattaaagttgcgaaaatcatatatgtgtccattcgttggtctgtttatttttttcttttcatggtcataatcctgattctatatttttggttttgagaaaagctttactattaaaggctatctagattgtaaagaacatgcaaggttgatggaatatctaggaggatcgcagataggtaatgttgaaaattagttaaaattgttagatatgtaattgggattttagtatgcaacatatttgaattactatctccatattaaaatatagctatattatcttaaggtagttatatttttagatagcgggtgtagtttttcactagaactacaaatctatatgatgagtagggtgcgatggcatattgttatatatcgtctatatttgtatatttgtaaggaacgcatcaacagtgatgatcactattcgatgcatgcctagctatggttttctttgttatgttttttcacataaaaagtacattgtctatgtcattcacctatagtttcataataagaatcacttcatccagcgttgggctcatggtgactcgccgtcaccaagtccgcctatataaacaacatatatggattgcttatacggatgaactgcatttatacctaggaaaaatatgtagtggaaactaaaaactatcgctgtatctaaaaatgaacgcatgagatttgtccacgtcaactagagtaaaaattttactcccagcattactttggttgacgtggataaaactcatatgtctatttttagatctaacgaccgttttcagatttttagtgtatacgtggtttgcactacatatttttcatagattttcaggacctactctttgttgcttacatgtaaaaacagagtatgtccattgaggcacttcgtgcaatgcaaatctatatttcgtctcagtggtttagtaatgaaatcaatatttttttatattctattgtactagttctcggaaccgtcgatagctttgaacctgagattacaattccggaacgaaattctgaaacttcggtaatttcgcccccaccggcaagcacatatttcacacgaaagtttccgattatcttttttcagtttttgtgaatttgtttaaaatttattcaaattcattcaaaattcgtcaaactttcaaaaaataattagggaaagaagtactgaaattccaaaaatttcggaaaccctgcttcgaaccagaaaattatctgctccattaggaagtccgattccggtgcttaatcggaatgttcagttctcatccgatcagtccctcgttcttctccgactgctaatcggactcgatcaaacagtttccacgcgccatatagctcgccatccatgatccatccatggcgacgcacacacaccaatcgaaacctgtagaagaacccatggctgcagctacgcaagatcacctcccttcttctccggccgccgccgccgccgaccaaccacaggcggcggcgtacatccgccttgtcatagagcagctgctatcccgcgacaccgccagcgacaccggccgcatccgcctcctgctccggcgacgcccccgcggcgtcgtcgccgccagcttccccgcggccgtcacggcggcgctcgacgacctggaggcgctctactccgaggggagcgcgccgatggcggcgctggcgcgcgacgcggcgcggtcgaggcgggcggggcacgaggagcggctgcgccgcgccgcgtcccagcgcctcgctgtcgagggcccgatccgcgacctcgccgccggcatcgacgcggcggggaagcggctcggggaggaggaggccgtcgtccgtcgaacgcagcggcggctgctgctgctgtccggcgccgtcgccgaggaggccgacgtcggcgcggtggtgtccctcgtggagcgcctcgcccgtgcgcagggggcggaggcggctctcgcggtggccatggaggcgatgaaggcgcgtcaccggcggctgctgctgcagcgcgaagctgccgaggtcgccgagctcacggagatttcggcgctggaggacattccacaggtagcccgtggcaggaaagaagacgaccaactcctcagggaagctgatgaccgcttgagagctgatcttactgtgctcattgaatgttttgtagagccgttgtaacgtagttactctgtttctcttaactaggacggatgcccgcgctagatgcgcggccaatttatttattgtctataaaaacaatgttaaaagaagcaatatctcaccggaatggctattcactataagaaatagactcttatagaccatagattttggtatgtactaaataatcagaatggctatcatatccaatcaaaaatcactttattccggttatatataaattcagcattcaccataacttattttcattgtcttgaaacatgagtgtctttttaatagatggaattgcagacaaaaaaccaaatacatcattaataccataaaaagttaatctccacatcatacccaagtgcccatgtctcgtagatgtccaaatttatatgtaaatatttaaaaacaccacttctaccaattaataggataaaacaaaattaaacttatatacgaatgctcctgtaacgatcgggtgaagccgactatagttactaaggagttttctctaatgccttattcatgggtcccgtgatatagtcgcgctcctcaagataagcgtagaccataattttatctataagtaggccagttaaactttattgtcaatggtaggttaaaaatttgtggtatgatttttagatgtatagttgcggaattgttcagcacaaaagtttttttttttctaaaaagtatgataatagaagaataaatgtgtgcaaaaatatgaagaaattgagggaagaaggggtggaagtacgtacataagtactatcttaaaaaaaacatacctatacatatggtaatacgtacaggctcaaggtggacccggtttgggggttaggcaatcttttttaataaatttaatggtggtaaatattgggtccacctaatttaatgaagatcaatggctagagaatttttataaatttctataaattacagtgccacatggcgacttaggagtgtttataggatgtcacgtggaggcttaggagcgtttgtagaaagtttaatggacttttagtatatatataactaggaaggtagcccgcgcacatgcgcgtgcaccttatttaatgtacgtaaaattttattatgaatgtccatgtgtgtgtgactttgttttaaaatattcttttactatatctaaataagaattgaacttatttaatgtgttttgaatgctggttataattttcttctgattacctttacagcgcataaattctaaactaaaattacttgtgaacgtacacttcttaatttatgagaaaatattatgtcgaaacaatatgtgtagttcctatgagtaaattttgggaattttgacttcctacagagatatcttacccccaaacatttgctcaaaatgtctaattttttttatgctatttgaagttttacatattttcattccattagcgctgctaaaagtttgaatatttctatttagaatgggttttaaaaccaattttttataaaaaaaatagataaattttatttgttttcatgtccattttttaaagaaatttggagaattctattctatgaagcatcttttgaaattatttgatctctgcaatttgggttgaaaacataagtgggttgagcctacaacctgatatggggtaaagttttctcttctaaattatctcacttcagtagagtaagaaatattaaaatagaggtcatgtaataaatacacatttctagattgttctacactaaatgttagaaatttacaacgtattgtagcaagttctacaaaaagaaataaatgaacatgatttttaattcctatatgaaagtgactcattatattggtaaggccacctcatcattgtttcactgataagattctttgttgcaacccacttgcttgtacgatcaatatgatgttcaaccgagcatgtttttattttcattatgttgtctataaaaaattaacgctagatgggctacacattatgactaaaaacaatatcatttaaagtttttctctaatttattagtgacttcattgatcatatatataatttagatgctatgaccacctaaagattatttatttatctcctaagtcaatcatttattgataaaaagctccaagatcaaattgtataggcaaatagcccccatatacatgttgagaaaaaataattaagttgatagaaagttgttaggtgtctatcaggatataactaatgggtataccagctttattaaaaattaaggtgcgatattccgattttcaatgacgaattttaatatattttatatttagtgttggcctcaaggtggatgtgggtccggaatgtactttttatgttggcatttaaatatagtcaatatgaatatatgatttcactaaaaatataatagttcaaatagatcataagttgaatatatgatttgaaaagttataattatttttatttatattgtttctattagttctaagaggagaaagagaagaatagggacagtgggatacctggctagaccttatatgtggagggttcatttgtggttttttctccataaagataattttaattttaattatcataaataaacataaaaataagagaaaaggaacgatacacaccgcacggggagagagagagagggagagggtgttttttcataaaaaaagattgatctaacaacctaaaataatgtgttggatgtttaagcgaaactaatggtcggatgttttgcttttcctcacataattttgtacgatttttttaacttaagagagacccctagtgtgtccctgggtggtttagaaacatttataagatggttaatatgttttgacgccgcatgggagcgcggaggaagatttgggatgtttttttgttgaaaaagatcgatctaataacctaaaataatgtaaatcgattgtcgaatgttttattttttttaagatttcctctaatttaagagtgctatatattccctccgttccataaaaactcaaattagaatatgatatgacatatttaagaacaacgaatctggaaatgtatttacaaatatttgtatgatgttgaattttattaggagagtatatatgaagagttggctagatataatatgttgatgggctttttaggcccataagaaagtatttaactttaattgttatggggattatagaaaaaagagaggaacggtggttggagccttgcggggattgtacgtacgtgcgcatgaaggctgacatccggactccggacggagattttttttccacgtgaaataaatctaacgataaaaattaatgggcccatcaatttaaatgaaaattaatggtcagatttttactattttattagagtgtcacatggtgactcgagagcgtttataggataccacatggcaacctaggagtgtttgtagaaagtttaattgattttagtatataatagatagatataatagatgtacgtttgaccatttatcttattcgaaaactatatcttttaatctattctatgactaaaggcacttatgtacgttttatttatttttaatttatacatcttttaaataagacaaatgatctacatggtataaaatcaaaaatacatatctccgttgtaggtctacatgttggcgcgctcatgttgtggtggtgatgtctgcgtcgcttatcttccctgttaccatcaatgaagacgaggcaactattgttgtgttcatcacatctaaaagctcgttgtcatcaccatcgccgtacgtgcccctccgaagcatgtcaccatcgccaccgctattcctgtggtccctgacatcgttgctggaccgtacccatggaggctcgaatgcatgggtatgttgtgttcagtacatataaggccggatcagcataactttagatctttggatctgaatatttgattacgtcaataatatttacataaattattttatttctattttagatgaaatgtgaaattttaaaccactgcaatgtgactacaaacttgaaatgcagcgcgtatttgaaatctacaactatatctgtcggaggtatgggcccagaggtatgcgaagtgagggaaagttacctttctatccagccgcgtggctctacagcctggccctactcccacgcctcgcgagtcacagaagtggccggggggcctcggggtgccacgtcgtgcccctcaggctctcccgctgcctcgccccgaggccctcgcccagctgccatatggcggggggagcgagcaggaagggggcccaggctgaacaaccatcaatgcgcagcgccccaactgtccctcaccgcatttaatgcggtaagggcagacgtgcggtgccgcctagctgatccacgtcaatcggatgtaaccagtctgtgaccggcctgttgccggtcacatccgattgaacgggtggccgtgcccccacgtcacctctgtaacaggcggagtggaagtaggtatgacccgtcctatcatggtgtcattcggggttccctccatgagagaaggaacaccacaagtcttcactcatttatgagggaatgacagggctgtcccctgtgtcaggcgaggggtggcgctgggtcccactcaaggacaggctgctgcttagcttccgagcgaaggcacggatcgtggcccggtcaaggtaaggtgggtccccctcccagggaaggataggtagaggcggtgcatgtggtatccccttgaactataaaaggaggaccttgcccaccgagcaaagggacgactctcagaaaacctgaactctaggagaagaaggggagaaagctctccggagttaaggaacccttgtaactcttaaccataatctcaaacacaggagtagggtattatgctccacagcggcccgaacctgtataatccgattctgtgcaagctagctagtagccttaggggcggatacgcgatttctaagaggcgagcctcttcccccggccgaactcacgaaaggggggtctcacgacctcccgctatcgagggccttccctcgacagctggcgcgccaggtagggggaaggtcgcgcgctctgaagtgaagtcgttttcttccgccccaagtttccctgggcccttgacgaccatggtcgagatcctggaggtggaggaggcggtggcgtttacccccaccccgtccgggagtgagtattctagtgggagccgcggccctcgtcaccgccgccgcgactccccaactcctccccgccgcgaaccctcgcggagggaggataccacccgttcgggtggttcggccctctcttcgcccccgggcggggggaggccacgacgcgtcggggcacgtcgccgcctcacttacggcgacgacgattcgccccgaggcgcgcttcaggcggcgggtgcccttctgtggcatccccccgtaaactcggagccagagacccctgttcagcgctggctagacgacttggccaacttggtcacctctgcccagcggcagttggctgctggcgaccgacctgccgccaccggtacgtcgcgtacccctgttaccctctcctcgtcggcaaggaggagggcccgtcgctcggccaccgcctcaaggcggtccacggcgccaacatcgtcaggggcctcaggaagccggaggcgtcatgacggtctctacggggagcaggacgctcggatcaacatcgagcgacgcagggacgagcgctgagctgcccgcatggggaaaggcgcctcctcatctggagtgccacgttcctcctcacgaggcggccctcccccacgctctcccctggagggacgggttgtaaggccttcgtggtgagtctccagaatgtcctgtggcccctgaagtttcgccccaacctcacggagaagtatgatggcagcatcaatccctccgagttcctccagatctacaccacgattattgtggtggcagggggtgactatcgggtcatggcgaattacttccccatggccctgaaggatcaggcgcgtggctggttgatgacccagccccccgactccatccactcctgggaggatctgtgccagcagttcgttacgaacttccagggcacatatccccgtccgggagaagaggcggacctgcacgctatacggcggaaggacgacgagtccctccgctcgtacatacaacgcttttgttaggtccgcaacactattcggtgcattccggcccacgcggtcgtgtatgcgtttcggaatggcgtgcagcataactgcatgctagagaagatcgcctccaaggagcccaagaccaccgccgagctttttgagctggcggacaaggtggctcggaaggaggaggcgtgggcctggaactctcccggcaccggtgcggcggccacggctgcccccgagtctgccccccactctaagtggcgagataggagaggcaaaaggaaaccggcccgctccgatgacgagggccatgtccttgcggcagatgggcccgcacgggccccgtgcaagggaaaggacaccggcgacaagacgatctccactgctccatccggcgagggccggtcggcagacaagtggtgctcggtgcacaacacttatcggcacagtctcgccgactgccgctcggtcaagaatttggctgagcgattccgaaaggccgatgaggagaagcggcagggtcgacgggagggcaaagcccccgccacctcaaccggtaaccggcgagaagaggccaagaacaaggcccccgccgatgatggcggtgacagtgaggatctggatttccagatacctcagggaaccgtcgccacgctcgacggggggggggggggggggcgtgcgctcacacctctcgccggggcttcaaggccatgaggcgagagcttttggccgctgttcccacgcacgaggcggctcggaaggcgcgctggtcggaggtgaagctcacctttgaccagagcgaccatccgacagtgctcgctcgaggagggaagttggcccttgtggtctccccgaccattcacaacgtcaggatgaagcgtgtcctggttgaatggagagccagcctgagcatcatctccccagccgccttcgacgcactcaaggccccggggatgaagctccagccgtcgctgccgatcatcggcgtgactccgggacatacgtggcctcttggccacgtcgagctcccgatgaccttcggcgactccaccaacttccgcaccgagcgaaacgacttcgatgtggcggacctcaatctgccctacaacgcggtcctgggcagacccacgttggtgaagttcatggccgccacccactatgcctacctccagatgaagatgcagggccctgctggtcccatcaccgtctttggcgatgtcaaagttgccctcacctgcgcggagcaatgcgccgacaacctggcggtggccacggagccgcaggccccggaggcctccgcgtcccgcctccaagaagcgcctcacctcggctgatgaggtgcccgtcaaggagatcccccttggcgatgatgtgtccaagaccgccaaaattggcggaaacctgggcgccaaataggaaggcgcgcttgtctccttccttcgggcaaattctgacgtcttcgcatggaagctgtcagatatgcccagggtcctcaaggaggtgatcgagcaccgctttgccgtccggcaaaaagtgcggcgtcaagccctggagcgacaggccttcatccgagaggaagtggcgtggctcctggaggctgacttcatccgcgaggttatccatccggagtggctggcgaacctggtggtcgccccgaaggccaacggcaagctccggatgtgcatcgactacacggacctcaacaaggcatgccctaaagatcccttccatctaccacacatagatcagatagtcgactccactgcggggtgtgaccttttgtgttttctagatgcctactctgggtatcactagattcgcatggctagggaagataaggaaaaaactgccttcattactcctgtgggcaccttttgttatacaactatgccttttgggttaaaaaattcaggacctacttttcagcgcatgactcgtattattttgagtaatcaaatagggcgcaatgtagaggcgtatgtcgatgacctggtggtaaagacgcgccactaggacacgttgctgcaggatttggctgagactttcgatagtcttaggtccacacgcgtgaaactgaatcccgataagtgtgttcggtgtgccggcgggcaaacttctcggttttctagtctccttccgaggcatagaagcaaatcccgagaaaatacacgcgatagagaggatgggcccccctacaaacttagggatgtgcagtgcgtcactggatgcatggccgccctaagtcgattcatatcgaggctgggagagagggcgctacccctattcaagctcctcaagcgctctaggccgtttgtgtggacggaggaagctgagcaagctctcaaccagttgaaagcttacctcacctcccccccatcttggtagccccggggccggaggaaccgttgctactctacttggccgcaaccccccatgtggtgagtaccgccctagtagtcgagtgcgaagagggcgaaccggaggcccctttaactcgcgatggccctacgtctcccaaaggcccggagcccgaggcccccgtgggaggaagggaggctttggcgagtggtcctaaggcctatgatcccgacatgactcgagacccccccggggcccccgagcaagggcaacccagatcatcccgccaagcaaatccaccagccggcccaagccttgcaggtcatcccgctctcttggccttttgtggtctaggggctagacatccttggaccattcaaggctgctcgaggcgggtatcaacaccttgtacgtcgccatcgacaagttcaccaagtggcccgaagcttacccgatcgtcaagatcaacaagcattccgccctcaagttcatcaggggcatcacgtcacgattcggagtgcccaaccgcatcattacagataacggcacccagttcaccagtgagctgttcggcgactattgcaacgacatgggcatcaaattgtgctttgcctcacccgcccaccctaagagcaacggccaagtcgagcgagccaacgccgaaatcctcaaaggccttaagaccaagatgtacaacgtcctaaagaaacacggggattcgaggctcgaggagttgcccaccgtgttgtgggcaaatcggaccactccaagtcgtgccacgggggaaacaccatttttcctagtgtatggcgccgaagcggtcctaccctcggagctttccctgggatcgcctcgcgtcgcgctgtacaatgaggccaaccaggatgatcttcgccgcgacgatctcgtttatcttgaagaatggagaaggcgtgtggccctgcgtgccgcgtgctaccaacaaagcctgtggcgctaccatcagcgcctcgtccgggcccagtcactgcaagttggcgatctcgtcctacgccgcgtccaatcgcgtctgggctgagcaagctctcgccaatgtgggaagggccatacaaattgatcggtgttccccggctaggctctattcgactaaccagggaggacggcaccgagttgcctaacccctggaatatcgaacacctccgtcgcttctatccatagcgtcgagattttttgctttctaggagctcgggccaacccccgcacaacccctcggtttgtgcgggcttggtcgggggctaccactgtgtatccttttccctttacaagcaatgaatttttctacttagtgtgaagcccgttatgccccccttttctctctctttcctttggcttgtcctggttcaaaggatagttcgcgcttactctgaaccctaagtgccgtggggcgacctgaaaaccgcccaaagggagcacaaacgcgggccgcgccccgggttgcgccgaaccctgggggctcggaagggcctacactcggccgtccccgaccccttgtcgtcgtagccccggtctggcaagtcccgctgggcggcttcctcagggcgtcggttttgcctttcaccacttaggtaccacggaccgagcgcgggtttgccttttcgctagaacaagcccgagggggggggggaggatggggtaaaagcggcatttcgatcacaggcagattaattatatacttttgctcttgttttttcctctttctatgccgcaggcattcaatggaaaaagcaaaggggtaaaaagtgcgaaaaggaagttttaattgcagaacaagacaggaagacacgatggcctaaatacaagaagtgtctgctacaggcacacaacaatgggaaattgaaagcgcgggtaatcacggagtgctcgggcccccgaggccggtgccgctaacgacgttgtaatgccccgatttttgttcgggaataaaaatcaattaataatgcattttctagaaattaaataaaagttaaatcaatttaatcaagtgaaattatagaggaaattaaaaatttcctttaaaaatcattggccggaaatattttgtaatattctctttgccctaaaatactctccggatttttcagcaaattttcggagctcaaggagtaattataataatacaaagttcatttaaaccaattaaattaaatgaaaaacaaataaaatccctcccctccttccttgggctcagcccaatcccttccccctccttccccggccaggccggccttccccctccattcttgggccgtcggcctgttcccctttccccttgtaaaagtccgcttcacgtcctcctcagcctcctctctctcactccggccgacaagtaggaccgcagggcccactcgtcagcttctccccctacctccatccggccggctgaaactgccatggccgctggttccgccccacgacgccgcgcctcccgcgccccaccccgtcccgtgagcgcgtggactcgatccccacctcctcttcccccactctccccacggaatcggcaccgaaccgctgccaccacccccacgtcgagctccacgtcgccggccggtttccacctctctcgggctcgatcccgccttccctcccgtcttcccctcatccgtttcctccatttttcccaagccgccgcgccctcccttgctctccccgcgccgagcccacgcgccgccgctctccggcgagctccagccgcctctagccgccgcactagccaccgccgcgccactccgcttgcaccgccagcttcgccgtgcctcgccgtgcctcagcctccactccgtttccccattccatcgtcgaaactccatctccaccatgaaaccgagccgccgccccttccaacgcctccagccgcccgccaccgccactctagccaatgccgcgctgcgccgctgcagccaaaagctccgccgcatcgtgccgcaccccggcatccactccgttcgccccctccacccccgcagcaccattcccatcgtggtgccaagctaccgccacctgtaccgcctccagccgcacatcgccgccgtcctagccaccggtgtgccacgcgacaacctccaccggcttcgccgtctcaagggcaagcccggctaccacttcccctccccaaaccgccgccgaaacgccgctgccaccaccaacctgagccaccaactccatttgccgactccaaccgcgtcgtcctgctgctttggtcgtcgccaatccacgccgtcgcctccctcggctccgcaaggacgaggaggtcctcggccactgctccccgtcgcccgaatcccgtcggaactccacctccatcgcacaccggtgagcacccgccgcttttcttgcttccggccggtgattcacgccgccgggagtctcctcgtgcccctttccctgcagctaacccatcctccccgttcgccagatcccgccggccctcggccgtgcctccggcgtggtcgggagtcgccggaatgccgttcccgcctcatcccgtgccgaccaccgccatcgcttccgtcgccgaccgcctcctcgtggtcatctcgccgtcgtgccctctggtgatcatccctcttccttccccgccgcctcctgtgctgtgcgccgccgttccttgcaccgccagtgttggcgccggtggccgtccggtcgtgcgccgccgctacccagtcgggttggccggcgagccaacccgcctctctgctgcgcaccactaccgtggaccaagtccacgatggaccaaatcctttggcccgctgactcattgggcccgcccgtcggcgccggctctttgctgatgtcagcgatgagcttatcccttcagaaaataattaataattgctcaataattcggtttaattatagaaattgattaaatggctcaaagcttctaaaaatcatatctaattcattcgaactccaaattgagccattcaacttgcaaaattcatctaaaattgagctctacatgtttgtttactttttatgtactgtttccttggtttttattagagtttttcctcgttttgcgtgccaaggtgtagtttccgttgtttcggaagttcgtagtcgcgaggaaaagagttcagaagatcaaagtgaagaagcaaggcaagtcacacattccccttgagaattttgatcctaatttacaaatgttttatcgtttacaaataaaattgcatgtcttgctaattacatgggatccgggtattacctatctgcttgcttgtgccatatttacttgatatctgtcctttgtcaaccttgggtaataaatcaactagctcatgttacttatgtgacctagctagaactatatgcttagccatgcttaattaccactagcccggttgatgggataattatagtattagacctttttagtgtcagaatgagctgcatgctcgagacatctggccatgcttcatggtcgtaattacccaactaaaatgtgacttcatggtgggctgtgggtgcatggttttgctagtcgtgcccatggcaattaagaaccggttcacgggaaaccctggaagaatttatcgtgcttaccacaagccagcgtgggcaacagctgggcttgtagtgtagctttcctctagccgacgcatccaggcaagggtgggtgtgatggaatttggatgggccctgcgacggcctatgcggcttccggattcacctaggcacgagaggggactgcccgctgccttgcgaggagtgggggtgaaatctgaggtgtggtgtgcttggttagagggagttatgagaagggtcctatcacgacctctttccagtatgtcgtggtggcatgtcagcgcacggaaacgtgtcgtggggctatgtcttgtgggtacagttgtacacctctgatcagagtaaaactattcgaatagccgtgcccgcggttatggtcggtcgaccagattcaccgtgattagtctcacccctaataaatcgacccaatgcactgtagttcaggtgggttggttgggcctgttcaacgtggtatagcgttgatcagtggagatttaatagtaccttaattactcaatagttttactgttttgctcaataaaatgttttacaaccgcctttatacaaatagccacaagccattcttgaatcccgttgcacgtctgcatcattggtgtggcttgctgagtatggtggttgtactcagccttgctattattccccttttttcagaagtgtagtgcttctgagctgaagacgaagttagaagaccaaggttcagaccccagttaagttttgcctgtgagtggagctgaagccccgctaggatcgccttttcccgctgttgtcattttctttcggtgtgaggactaagtgcctcttctgtaagtatttacgctttatttatgtttggaactgtatattacttgtcgttttgtgtaccctggcttgtcctggacagggatttaatacacaaaatagtccggaaatttgggttaaatttctgggcgtgacagacgtcgtcccagtcctcgccgccgaagtcgtcatcatcgtccccgctcccgctctccttgtccgaggcaagcccgaaggtgaaccggggggccgacccctcgaagttagagacgatcgcgtcggccgcctcccggacttgctcccgagcccttgcctcggtccctggaggaaaatcctcgagtgcgcgccatgggacgaagtcggggtcacgcgcttggtggctcgcgaggaccagttccaccgcgtcccgcgccaagaaagccgacgacgatttcacagtctcgccgacctccttctccagcctctccagatccgccgccagcccgtccagccggagtgcgactgccggcgtgtgggcggaagcttactatcccggtgcacggaaatgccgactcggcgccccgcgcgctccagccggtcgacggcgtcggagagcttcccgggtccgatcccgttggtgaggcggagggccgcaatctccctggcctgatcttgcaccaagcgctctatatcggcgagagtgctctgagccatggcaagctggctccccaactccgcgccgccgggctgcccgcccgccgccaggtccttctcacgggcctccagctcagaagccctcgccgctatcgccgcgcgctcggcgcgagcactctccagatgccgagcatcgcgcccggcaacagcctcctcgcgttttgcgagctgctcgcccagccggcgcgaggccacctcatggcggttcacctcagcttcgcgctcggcgagtacaacgtcccgttctcggcacgcctcttcccagagccgtagctcctctgcgtggcggtccactgaagctttcgcggcgagggtgatccggtcacgctcagctgcggcctcttcacgaaggtgaagggaggcctccacctccgctgctgttctctcgtgggcggccaaggtggactcccgcagatcgagcagacgcgctcgctcctccagcgcctgagtccgcctctacagctcctgggctcgctgcgcctgctcctggccacgcgcgttttgctcacgctggctctgatcgaggacctcgattcgccggcgaatcgtggtctcgaactcctgcgtggagcggacacgctcatccaaggccctgcgttcggcctcgagcgccgctgtccgagcccgcagcgaggcatcggcctccgatacccgctgctcttgggcagcagctgcgtcgaggataccgcgggcgtccttgatcctcttcgccagatcctcggcatgggcctcgtactgaaggcgatgtcacccagtgcttcgtccaggacgctcgaggcaatcagcgccgcctgccgctcttcctccacctctcgcatgacggagtccagcgactcctcgcgcgcctggattttggctagttgggcttggcgcattttgcgtcccaccctcaccatgtcgtccacggcgcgacgcccctcgtcaactcgcacgcgagctgtgcccatgcagcctccagggccgctcgctcttccgccagggcttgaacttgggcgttgagcccctcccgaacggtggaatcggcggcagcgagcacctgcaggagcggctccatacttgccggagtcggagaagaaaaagttgcggcccgcccccgggacgacggagtgccgctggatcccccgcgagactgggggatgctctcggccccccttctacacgaccagccttgagggcgccccaagtgcaagggggagcggccgtccctctcgccccccgcctcgggtcctcgggtagattcggcctcggcctcaggcttgggcccgcccccaatttcggactcggcctccggctcgggcccgcccccgatttcggccttgacctcgagctcaaggccgcctccggcctcggcatccgagccacgacctccttcgccccccgatcccgggtggcgctccgcatgaaccctggtctcggagtcgcccccaggagggacgtcaccgccgctatcgcccgcggcgggacgagtcccggctggggttcgctcggggccggacccggtatgcggcccgtgggccctgccgaggggctgtgaaggccccgcggccttggatcggccaagcctgggccgctccgatcattcggatttggtcccccgcgaagggtcggaccgcgtgacccccctgggaaggaatctcgctacaagagaacccagatcgcgttaacaaataaaaagaaaaggagggaacaagagaccaagctggataaaagcaccgaggtgggtgccggcgatcgtacctgcggggagggcggttgaaagtccacttcgggggctcaatgaagctcccccgacacggctccatttgtcctatcttccggagccgtttcttcttccgtccggcctcggtcccggcagggctcttgtggcccgctagcggacgatccacgcgctcggcgccccctccacgcgggggagagggcggtcgagattcggacatcttccgcttccctttcgggtcgctggccgagtcgtccccgggtccgcggtttgggccgggagacctagagctcccacccccgccgggtccgcttgtccgactcccgcctgctgtcgcgccaccgccagcaacatcggcagcgctaccaccggtgccgtcccggctggacctgctcctgccggtgccaacaaccgacacggccaggatgctctcccggtcgcggtcgcaccatagggaaaggatcccgtctggaatcagtgtttgctcggcggagtccaagcccagtacccgccgaatcaccatcttcgcgtcctcctcctcccagtcccagcgctcacccacatgcgtgcgcatggggttgttgggaccagtgtactcccacgcgccacgggatcgatcctggagaggtgcgatgcggcggcggaaatagtcaccaaagaccatcgcccctgtgaggcccaggcttcgcaggcccctaaggcgatcccacaccgcgtcgtactcttcgcccagttacgaaaccgccagccatacggcggatctttcgggaggaccggcaggaagccgaagtcgcgggtggtccggcaacacggtgtagaaccagtccttcttccagtcctcccatttcttgcggagatgactctcgatgtattgccccgccgtgcctggccggggctggaagtaacatccccccaccaccgcaccttgcagcagctgtgggatgaagaaagactggaacagccgcatcgtcagccgcaccccgatgaacatctcgcacagatgcgcgaagatggccagcgtcatcacggcgttgggtgcgagatgcaaggcatggatttcatagaaatccaaaacctcatggaagaatccggagaacggcggaatcaaccccgccatagcgaaggacaagaggtgcacggatcgctccggatacagcggccgcggccgcaactcccccgccctcacgacggcgccttccggcatgatcttgcgggggaggctaaggtgtctatccgccataatgcgtgatgccgggagcaccgtgtcgccagcgtcttgagccatgatggccggcggagaagcggcggagggcttggcgcgcggaatagtgtgaagtggtgagaatgttagggcttaaggagcgagaagacgagtgggcagttggcgaaaggaaggagacaacatccttgcctccgtatccttttatcctcgcctcacccacgctcacctcctcgtttcacgccctcacggttgcccccacgattctcgcgcccacggttgtctcttcgtttcccgcgtcaactcatcacgtcgcccattgaatccacgccctgcatttagtgcgcctatcagcggcacactcggagtagggcgcacaacggtcacggacacaacctgagtgaaccgtcaccactaccgccgcatgagtagcgggcaagagaatcgaggcgtggcctgaccgaccccccgattttcacgccttaaacatccccatcatcagcgtggtcagtggcggcaaactgctgccgtggttaatatgccaacctggccactcggcgacatttccttagattccctgtcgggcccacaaccccagcttgggaagtcgtgaggcaccacatcagaccgacctcaggaggtcagtgtccaatatggtgccaggggctactgtcggagatgggcctgggggtatgcgaagtgggggaaagttacctttccatccagccgcgtggctctacagcctagccctactcccgcgcctcgcgagtcacaaaagcggccggggggcctcggggtgccatgtcgtgcccctcgggctctcccgctgccttgtcccgaggccctcgcccagctaccatgtggcggggggagcgagcaggaagggggccgaggctgaacagccatcaatgcgcagcgcctcaactgtccctcaccgcatttaatgcggtaagggcagatgtgcggtgccgcctagctgacccacgtcaatcggatgtaaccagtctgtgaccggcctgttgccggtcacatccgattgaacgggcggccgtgcccccacgtcgcttctgtaacaggcggagtggaagtaggtatgacccgtcccatcagggcataattcggggttccctccatgagagaaggaccaccacaagtcttcacccatttataagggaatgacagggctgtcccccgtgtcaggcggggggtggcgctgggtcccacttaggacgggctgctgcttagcttctgagcgaaggcacggatcatggcccggtcaaggtaaggtgggtccccctcccagggaaggataggtagaggcggtgcatgtggtatccccttgaactataaaaggaggatcttgcccaccgagcaaagggacgactcccagaaaacctgaactctaggagaagaaggggagaaatctctccggagttaaggaacccttgtaactcttaaccataatctcaaacacaggagtagggtattacgctccacagcggcccgaacctgtataatccgattgtgtgcaagctagctagtagccttaggggcggatacgcgatttctaagaggcgagcctcttcctccggccaaactcacgaaagggggggtctcacgacctcccgctatcgagggccttccctcgacagtatcatatgatttcctcttcagtatttgtattaaaaaacagagtatggtcattgatcaccacccactatttacaattgttgcaaattcgctactacttgtgaatgtgctaatagttgtgaatgcatataattataatatcgtaatttcaaattaagctagtcctttctgcaggatcttatagtgcttatgcttctgcttataatcgaatcggataagcatatgaattagtgaaacaacaaggctcctatattttgtcagtgctttactaatggtatcaatatcatatccaaaatacaatatgctcggtaatttatacgaaagtacatgtagtttagtggtttgtagtgatctaatcgaatagcacctcaaggtcatatgttgaaatcttcatgagagcgaatttcacattgagttgtttgaggggctaagttcccaatttaaatgacaccacacaccgccgtgacgtgtggtgtccctcatcgagcgcctcggtcgtcgtgcgcattggacggaggcggctcttgcggctgccatggaggcgggtcaccggcgcctgcccctatagcgtgaaactgcccatgtcgccgagctcaaggagaggatattccacaagtacctcgtgccagcggagaagacgaccaactcaaggaaacagatggccgcttgagaactgatcttcgtgtgcttattaaatctttgtaaagcatttgtgaaatactgcccctgtttttgtattgtatgaattttggacgtaatattttactattcatcttattttatttttttaaaaaaattttcattaaaggcatttacgcatgacttatatgatttcactaaaatatgttgaataagtggaatgaaaaaacattatatattagagtaaattttagagaacctcattatggtcaaaattgtaaaaaaaaatacagatattatgacgcgtggcacataactattgatattgatattttggtgtatatatatatatatatatatatatatatatatatatatatatatgtttcgtaaaatcacacctttattaaaatctttattaattatagcatatttgaaacaatttttcaaagtacagaagagataaactatcaacattagttaagaacttaataattaaaatttttatatacactatatgttttattattttaagtaaatttgtactcaacatgcataaatcataatatatgttttataaaactttagaaccataatacattgggttatgtttcacaagtcataatatatgtggttttatataattttgatcataaaacatggggattttgaaatttactctatcaaagcatattatatatactccctccgtcccaaaatataagcatttttagactctgacacggtctccgatatattaatttgaccaacaatatagataaaagtaatatgttttaaataaaaagagttacttcctccgtttcacaatgtaagtcattctagcatttcccatattcatgttgatgttaatgaatctagatagatatatatgtctagattacttaacatcaatatgaatatgcaaaatgctagaatgacttacattatgaaacggagggagtacattctatgatagttatgatagtttgtttaatgataaatctagtaacatcaattttacatgattgatatttttttattttttttactattaatattcaaagttgaaaatgtttgacttatcactatgctaaaaatgcttatagtttaggatagagggagtaaaagttaacatcgtcctaaatttgaaaaggagagaatatatatattactatcttgggtcgtggaaacatgcacgtcgttttgaacgaaagtcaaacaagggatattacttgctctgtccaaaaatatcttaaatcctaccaaaggagcaattagcagagaaaaaaaattacctaaatgcttcttattagaggaagggtgaaaaaacatatttagattttttagagagctcgtaagaaatatacacaaggttcaaagcaatttcaaacattttttatgattgatcataagtttcaaaaggaataaaataatgcctcaaataaaattcgtgtctttacggcaataaatatgtgacacgttaaataaaaactcatcctttttggattgaaaaaaataggttagtccaaatcatttttgattcattcctgatgccaatacatttaggatggattcggggaacaaaaggccataatttgtggtgcttttcaggtttacttatgcaaaaaaaaaaaaaaacagagtatagccaccctgcccttgtatatgataattcatttaacatttattgaaaaatctaattaagtttataaaaagataagaagtatcaaattagtttcattaaaactagtttaatatatgtacctaattaaaaaatacataaggattccagcactattttcgtccgttatcatcatctgcatgtagacgcgatttttttaggcgaaacggactctgaggtgaactctagggtttgctatagggctcaattccaagatagatacgacgcgattttgctctaattcttgagaaggggaaaaatgaggagataaggatcgaaacccctcaatctgaacgcgcagagatgtagcctagagcggggggggggggggtgaataggctttcctgaaattttctcaacaatcgcagcggttaagattaacagtgcccggaacctcctggtgaaaaacaccggaacttcctggcagagatgagcagcccggaactttcggagttcttgagccaggaacttccgggcaatagagaaaatcaaaatttggggaagcaaaacaggtcctagctatagacaatcaggcacaaggttgcacaagatgtaaatcacaagataccagcagattcaaacatagatcatgcacaagagagacaaaggcgatttttttccgaagttcggatcacacgggtcctactctccattgaagtgctcaaagagccgggtctcgattaaccccttgcctcacttatgcaaagatcccagaagaagtccacagccttcaactcaacacttctaggtcattttctagaattgagtgaccgccaagatccaactcacaattccttctagaaaagaccacaagtgcaagttgctctacctaggacaacctctgaaaactcagcacaagaatctttactcacttacctcgtttccttgtggaggtgaggaaaaccttcacaaactttcccgggacattcacaagatctttggaagctcacgggcgacacctaaccgtctaggagaagatctccaagagtaataagcccaagtgacagcccacaaggtatccaaagtgctcaaacaaacataatctttaagccatctccaaaacactcctatactctaatctaatctctcaatctcacaagataggctctagatttgagtggaggaagcaaaggaagcttgggagtggctagaaaaccctagaacatgaaagaactgaagtggaatagccaaagggtgacctggggacgaaatccatatatataacggctaggtgacgtcatctagccgttactcacaagtttgaactggaaacctgccaggagattccgggcaaaagtgccaggaacttccaggcagcacttaggaaaaatctagctaaacttcggtgcccggaagtttcggccagaacctccgggtagccctctctgtcccggggagaaaataaactttggtgtccggaggttccagcctttagactcatggatatgactaagagcactttgtataccctggaaccacacttgaaacccctcttaacagtacggtttttcctaaactcaatttcgaaagagaaaaaactagtctaatcaccttcgatgtttttcgcacttaggaacattcaaattgaggggtctccttgcattcttagccatcacaacttcctttgggactaaactcctgtgaataaacttgataaacacgttagtcccctttaaccaccttgtcattaatcaccaaaacccactaggggtttaagtgcatcttcacaatcaattttggattatctccaaagatacgaacggattttatggaggaggcagcttccagtgatgtcgggtagttgcaggactcggacggaggtaggggacgacactgtgcactgggaaccacgcgacagtgagacgaagagcagggggacgccgattagacttgtggttgctagatgagctggatatgcacttggaggccgaggcggaagggaggaaaacgggctggctcggctgcatgctgaggaaataaatgcgctgaaaatggcccagagagaaaggagggtttttatttggatttggaaaaaagtacgatttacctcccgaactatcagggtcgatcgaattacccccttaaatcatcaaaccagatattttacaccatcaagtattcatagcagacaaataaccccctagcactgttcttagcggtttagacttaagcttgtacacgtggtgccaacgtggcaatccatacagtaaaaattgaaaaaaatccctaggcccacatgtcatacatatccctcaccaaatcccttgcgctctctctctctctcgtttaggtggctggcgacggaggtggaccttgctcgggcgggcgggcgacggaggcggagcgagctcgagtggccggcggtggaggtagagcgaactcgggagtcaccatggaccagtctccaccattgctccaggccgccgcttgaacttaaccaccgccccggggtgcttgcctcggcgctgctgcgctcgccttcacagactgcccgccactgtcgacgacacccttgactccgccggtgccctctccacctccgctccttgttgttatgcggcggcggcgacggaggtcaatgccgctagcgggcggggataaaggggaaagagagaggtgagaaaatccgacagagaggtgagatagtctgcatcggcggtggcttcctcgctgccttggcctcgtcaatctcccgtaccgtctcctgcatcctgtaatccacaaggtactctggctcgccgtcggcacgcatccgtgccttgctcgcctatgcaccctcgccgagcatgcgcaccaaccgcagcacgcccagccttgccgagcttgcgcaccaaccgggacacagaggaggttggaggaggcgaagccggagctgggcatgttgttgccgtactcgacgctgaaggtcctggaggcacaggccacccagaaagagggcctcgagctggaggtgggttgggttcttcggcggcgcggcatgcctcgtggactcgaactcggccaccttggcgcggaacgcctccagggtgtagcgctccctgctctcccacacccggcggctggtggcgagacgtttcttggcggagagactgacctgctggaggagcgtgttgaaggtcgtggtggggtcgacggcactggaggaggcagcggaaggtgtcatactcagggggctggtggagcgggggcacaatcttgcagatgccatagcgggacgcctcgggctcaatcaaggatgtacgcgatggggtcgatgaactacaccagcgtcggctccactgccgccgcctctatgttctgtgccaccgctgcctccgcgtccctcttcactgccgtccacgccgaccgtccccgcccaccgtcggcgcgcgcagtccgccgccgtcctcacaccgccgtgcgcatgccgagagaaagaggaagagtgagaaagagaatcagagaagagagaggggaagaggggaagtggggaagatgagtatcatacatgggtcccatatttttttaataaataaaatgctgactggattgctacgcgtacgccacgtaggacaaaaccgctctgaattgggtcgagggggtaatttgtccggtattgaaagttgagggtgaacgatgtctggttttcgggtttagaggggtaattcggtcgaccgcgatagttcaggaggtaattcgaaccttttcctttaggttttcatttaaataaatgctgaaatgatgttcgtatttttaaaattattaatggagctctggaaattctgaaaaaattcaaataatgtgattaatcatggaggatggtgaaatatgtattttaattaattacataatgctaatctttttcgactttttattaattttctcgtgttttcttcccgttgaaacgcacggatattttttctagtattttaataatatactagttttaagttaaaaatgttggctatactttttagtaaacttatttaatttatttttaaaaataattagaaaaaaatcaaaacggcttataataatacaaaacaacggcagtgtcattcttcaaggcaaacaaaagaattatctactcagcgagtctgatactctgattccgattcctaatcggaatatatcctgagtccctttttcttctccggctgatcagcgatcgatcagtccttgtccgattgctactccaactcgatatttcgacgccgatatatacgtcgatcgacaccaaaagctgctcatcgaccgatcgacgccatggctgccatgcaagtgcaaggtcatcccctccatctggcggtggcggcggtctacgtccgcctcgtcgtggacaacctgacgacgaccgcctcaccccgcaggagccaccgcctcctccacctgctccggctgcgccgccaccacgactaccgccgcctccggttcccgggcgccgtcgcggcggcgctcgacgacctcgaggacctctactcccagcaggggaggccgggcggcgagccgatcacaatggcggcggcggcgttcgcgcgccacggcatccggagggagcgtgcgaggcacgtggcgaggctccgggcggccgcgtcgctgcggctgtccgtcgccagcgccatccgcggcctcgccgtcaggtccaccgcgacgcggaggtgcgtcaagacggcgcgcggcctgatccggcagacgcaacggctgctccccgtcggcgagcgcgacctcgacggcggcggcgaggcgaccaccaccgagcgcgtggtgaccgtggtcgagttcctcgcgacgttccaggggatggaggcggagctggaggccgacatggaggcgatgggccccgagcacgagcgcctgctccggcggcacgacgccgccgtgggcgcggagcttgccgaggcggcggcgttggaggctatcccggagcttcctcctgccaccgaagaagaagtccaactcgtccgtgaagcttgtcgccgcgttctaagtgatcttgtagtgctcattgggttttttaaagccgttgcgaactatcttcgtgattaaatttagttgaagggactgaactatcaaaaatcagtcgacatcttatagccatcccgttaaatttatgttcattttggaactttttcaaatgtcagcccttgcaacaattttaattacttcctccgtttcatattataagactttttagtactgcccatctagattcattaacatctatatgaatatggacaatgtctagattcattaatatctatatgaatatggataatgctagaaagtcttataataaaaaacggatggagtacatgacaactttattgttggtataaacgttttacgtgatacaaataaactttacttaaactttgaaatttataagtaaaaattagggagaatagctaatatggtccctaaagtttcgctcctgggtcattttagtccttaatctttcatattgtccaaacaagtcctttaaatttgtcatgtgggctaatatagtccttggtcccaccaaaatcgccacatggacatgccatgtcaccttcctatgcaaaatctatatgatttgtccaatttacccttacgcattggaaaataaaaaacaaaaggaaaaagttaaaaaaatatatggtatatgcaagagcaaaaatatacctcaaaatatgtgaaaaaagaagtattttttcctatgattatgtctaattcacccttatatttatttttatatgatatacgtaagggtaaattggacaattcattatagattttgcatgaatgatgacatggcatatccatatgatggttttggtggacccaaggactattttaggctttatgataaaggttaaggatttctttggaccatttaaaaggttagggagtaaactgatcctacagagaaactttagggactaaagtagctattctctctaaaaattacatacaaattaaatttatgtagttaaggtcttatttcaaacaaatatttatttcaaagaaaacaaccgaacatgcaataaaaaaaagaaagaaaaattagattcaaacaatgttctttgttgcactaccaagccaagcaattatgcaggtgttttatttgcgctggaaccctttattataactatggagaaaatattgttgaacttatatagaggataaaaaatctaacttaattttaatcaacccttgatttgtttgttacgtaccttcacgaggcgattcaatcacacgaaagttgagttccttgattttgtaatttttgcttctagccatatttatatggcatgtgtacaaatggtatataggataattagctagcggtagtataatatttactcgatacaagagttgtgtgaacttaatctatcttttattcaaaagtcaataaatggtttttgagatatgctaaaaaaaatagaaccctcgatatactttaaagaagtacattctccgactacatataagacttgaacaaactaaaatgtttcccttcaacaatataaatgcccacacttaggctcatgccaccatcctagttacaacaacatatcatccaaaaagaagtgacaatactgcctcccgtccaatagtgttggagctcattgtaattgaagtggaccagaggcagaccatccaaaaagatgcaacaatactgcctccatccaaaagtctcttgacatattttattttcttatttttttcaaaggtataaggcatatctgtagtccctatatgctaaattaagttgttgatcgaaacctaatgatacatcttagtattaactggatacatgcatgcatatatataatttattggttttgtcatatggtggatgagttaatttctcgttggttttggtgacaaagatatgtatcctaaacttttggatggagtgagcagtaagttagccacgaaagaagaacacaatactggcataatgctaaatgcattaattaattactactatgtgtctagcacacggaaaacaattaatgtaagtttatagcgcatcgctctaaaccacaaaactatgtgtcattggtacataataccacatatggataggtcttatgggtgtcggctcgcttaaaacaagcatctatatggaaatttggatcaaattaataatcgacacctataaccacttattgttgttggttcataataaagattggcacttatatgtgagtcattagagctagcttttaaaaaccaatatcattatgtgagacatcacagtgggtttttaaagaaaaccagtattgacagatcgaaccgagctggtaggaggcaggggtcggttttatcttccaccaaatcctcttcttattgcttcccccacccttttatcttctcgatccatccacatcttcttctcttctcttcttctcccgtgcgagggtgtgcccccctatcaggggtgggtggcctccgatctagggcgtgcagcgagcagctttccccacagcaagggcacggcttgcacaacacgatgcgtggcagacaacctccccatggtagctcgatgtgctcgaggccctgctcgtattccactctagtcgccctgcctccttccctcgccgtgagctctaggtcatctagatatacctgccacgaggtcggtagaggctagatccagccgccacgagctcaaggcgtggctagatctggctaagggggagtggtggttgggggattcgacaacagacaacgcactagatgacgtgtggcagtggcaacgctcaacgcacaagtgggaggacttcatcacggcaagcagtggcaacggcggtgacattctcttcctagatatatgtgttcttagatgctaacttatacatgtttgattacgtaactttgtcgtttgattatcttgaaaacctttcgatctcatggtctctatgctgttgttggatggatggttgatatgttcttgaaaccattcaataatagatgttgactaatgtattcttggatgtgcgatgctttgggataatagggagctaccttattcatctgctcaaatcaagccgaaataatgaggattcatagaacctcggggtgcctgttactaaatcaacacctatgttttctcattagttccgtctcaattgtgccggttgaaaaacaaacacctatgtgggggtttccgatcgacatctatagtgttctatttacaagtgtgtttgggaagtttggttccaattcttaatcggaatatacgctccatctgtttttttttctctgatcaatgatcgatcaggccttctctgactgacgatacttctacaccattgttgagcacaactaaatcaagttttctgcacacgttaagcgcaattaaattctctttagggcaacggaccaccgctagatggtgtggtgttggtgactatgctggtgcgatggttggtggtagagatggtgctacaactatggttcaggtttatcgttttgaggattatatcagggtattgataagatcataattttgtttatttcggtccgaaattatttgattttttaacaaaatttagtgaaattttacaaatattaccaaattgactaaaaaattaaaatcaaaaattaaaaattatggccgaaataatattgtacggggtccaatagaaatttcggaagtttttagtccgaaatttgaaccctggctacaaccggtgcaggagttttaacagtggcctgaggatgttcttctgcagctcgcgggaacgtcgagctatctacggctgcctggaggatcctcctggcataacgcgcgcgagaggattcatatccaaatggcaataaacagcctcctctatgttcgacaaaaatttctctatcacccaattcatgtaggtgacacgtacaggccctattactaattaaggtgatgggtcgatgctttgctaacaacatgaatggatagaatgaaacacttacttaaagcaaaattcgaaaagaaaataaaatagaataggaacttcagatcttagagcatcactaatagattacgtgtaatatctctcaagaaatttatttttgggtttctaagtgaatactccctccattccaaattgatctatataaaattattttataggtacaccaagaccaagaaaatctaataactctctcatactatatttactatagcaacaaactcaatgcattcaccctccccaatattttctagccaacagcaaatcaagatattgcatcggttataaatactcgtgtgcatggatgcatgcatcaatgtccatttacttcaatacacaaataacgaatagactcaaataaataaagacaaatatgtagatcatttaggaataacctaaaaaaatatatatgtagatcaatttagaatggagggagtaggaagtaaaaaaattgatccctccaagagaaagactaaattttatcaaaaaaattaaaagtgggccttctgttaaactagctataaacacaattcttcgttttcctccatatgatcggattagatcacgcactcccctagtgcggcgctcctccctgacgcgggagagacaggagtaggaggggagcgctctctctccctcaaatcaacagaacaagaaatacgtggatgagaactccactacaggggttctgttggatctgatttttcacctaaaaccccttaaaatctgtgttggaaaaaatatgggagaactgttggtaacgctcttatatatagccagttctagcatcacaaagttgtttattgcatgatctctaccaagccagctctagcacagtaaatatgtgaatgcgtttgatattgaaatgtttcaaatcaaagtatcagttggagtacataacgggaagagagattcaagaaggtagaaaacacgtgcacctcatttagtactcgatcgtacaaccataacatttccactagtttttaactgtttcttcaaaacaaaataatatataccagcagaatttcaatccacttcatccattcgaaggcatagatcgatcagactaggaaagaaagaattatttgctttcaacaagtgtcattgccagaaaatagttaatctgttttgaacttgtgcatgcagtttaattagggaagagaagtacagattacacaaattctctgcatcatcctagctagtcaatcagtgcagccgtatcaacgcttaattgattcaagtttcaagagaatgaccccaaatatccatgagttcactattcttcaattgacaatgtgcttgattgaccatcaaaatggcaaatggcaagtactatcggtacaaagatgaccataattatcgctggctcaactcgggtcagagaaatttgcaatcaagttggtaccgtacgtgacaaaaaggaaactgtagagtaaccagatgctgcctataaatagcatcagataatgaagaactttcaagccaagagttagccaagaacgtccataaagaagagatggcatccagggtttccactgtcatctttcttgctgccatcattctcccattcttgtcattcgccgaagcccaacaacctcaaactcctccaagaagaaatccaccacgtgcaccgccatcaccaaggagagcaccgtcaccatcggtgactgcagaaccaacaccggcaccggtcatagcaccatcaccaccaccagttgtagcacctagccagccgctagtcgtagcacccacacagccaccaacaccatctggtggtagtcaatgcctaagagaaaatgtaattgcacttaatgtatgcggacaacttgatttgtccacgttgctcaacaacccgactaaggctatgcaagactgttgtccaccaatcaacaatctctcaagcaccattgccgcaggttgtctatgtgaggctgtgaagattaacctcggtgtcaccgccgatgtcctcttccttaaggcagtgctccgcgtgtgtggcaaggctgagctcggcaacctcggctgcttcctctgagctttcatgaacatcttctgctattctattagtatattaatatgaaagaaagcaaggcaacaaataagtaatacctgagctatgcacagagctagagctctatgagatgttactgatagaataaataaagttgtcattttataaatgtgcctgcatgatgcatgcctagttgtatgtgctactgcaagatgttgcatgtactaatatacaaaataattcgatctgagtgttacatggaagtcataattttataattttcctagtatgctccattgcattattgttaattcatgacttataccacactgtttttagtcagcatgtctctactctttctatacctataccaattaggtacagcggggaagctcacgttactcaaaaatatgaaacacttaattagctgaatagtaaaatctaaatcccatgacacaatacttatctcagtttctcgctgccgaatcccatgccttgcaaattcagtgcaaagtaaaagtaaggttttttcttttttaattggattactgatattaagttaattacccattgtttattaacaaatggattgggtaggacatgaggctacactaaatacatggttttcttgagcctaatttgattgcatagtttgagagacaatccatcagtgaacatttcatttagagtatgtgcaaggctcgacatagcctagtgtgaatattattggatggctaaatataattgtctaataattattttgataaatgcgatgtatcatgaatagacggttgtctacaatatgtaggaagggggccaagggaatggtgaaggtgtaggggatttgcttttttctatataagtagatcaaatggtggaaaataatgtaccggttcaaatgataagggattgcaagatgtttttctattttttttatttttttatgattttctctaatttattagaatgccacgtgatggcttatgagtgtttgtatggataacgcgtggccgctttatattaaaaagaagccatcatttaaaatcgattacatgttatataaaatatagtttaaagcacttacatgcatgaatgattattagctttatttcgattatttgaacatattaattcaaaaaataaaatctcgaactaagcggattgttttctctaagtaaaggcaccatatttttctatagaatagcataaactctgaggtagttctttttttccttataaattgtatatctaatttagcaatgtatgtttgcaaaaacaatgtatgatgatgcaacctgtcccgtgtttgttgaactatttcgtattttttgtggcatttctgatgacatgtatgtaaaagggcattagtgtttgtccctccagatatatttttatgtagtggcttcagcagttcagttattcatattttcttatgtacggaatatataatttagttatgcatgtttgtaaaacaatttatgatggtgcaatgtatgttgttaaattatttcatcgttgttattgtcattttttaatgattagttttacattcaagattattttataaaaaatgaatatatatatattattttatcttgaattgttttagataataaaaatcgattaaacatgatgtaaagtgcgcttaaatcacctcgtgtcatgttttcaatgttaaaaaaaattcaaagaaaacaagaaacatactccctctgtccaaaaaaatccaacttctggagtttgaattttgtcccacaaaaaccaacttctaccatgctatctatcctcggcacataaaacgagaagttttctcccttaaataccctttatctacccatcaacattactatgggctttttataggacaaagggtgtaccattctccacttaaataatgaacccgttattttaaacattagatctattccagaaaatcataaactgctgcatgacatgtcttatattaaaataaaatctgagaaatctgaggaaaaaacaaatcattggttttcactttgatcgttcgaaatttttttttaaaaaaaaaacaaactccccaccacccacccctcccgttgtatacacacacaaccttgtccaccctccaccccctaccatctctatgctatttatgtctctttggtccctccctccttatttttagctagcaaactaaaagaaacaatcaataaatgtgtgtaattttaagctacatgtatgatttctaatctaactattgctttatttgtaattaaaccaataatataacatccatataatctaagatcccataagaaataataaaagctatgaagttatagttgtttgaaatttgttataaacattatctccactattataaaaattaaagatatttccgctcaaaattttgatgtcaccttatttcggtatgatgtaggtttcatccgtcctctccgagatttaaataaaaggtcccacgcaatccatcgtcccctttttgctgcagatgaaattttcttcccaagtattagtcagaccaagacaagtgaacccgaatcgaactcccacatgacgtctcatctgatccgctctgcaaccgaaaacaaaagccggaagaggagagcagccgctggacctagaccacacatcgacaattccctcctcgtcgccttcctgcttgctgcctcatccccaattgatctttcttccaaaaacaccaaaaacagaatcctccatgtacgggaacacatgatgctacctcattcctatccattatcaaatcagattgatcagtcccatgccagacatcattctggttctacatagggaatccatgttccgaccaagacaggcatcttctgtggatatccatatcatcatttagttcacaactctcgggaacgtgtctttttttcaagattttcttgttaatctcacatcataaaccaacacccatctgaccatcttgtgcgctctctccgtggtcaagctccaggaggaagcagagcagtatggcactgtgtaattgtgacgaggactccctggccggttgtcgaaacatgaattcggcaataataaaacggggtagcgcacaagacctaaagtggatggatgcagagacaaaggatttagacaggttcaggccctctcaatgagaggtaataccctactcctgtttggggatttgaatccgccgggtgtagtatagatctgacgatcaggttgtctcatgccccctagagggcctcctgcccaccttatatagggtggggggcaggattacaagatagaaaccttaaccaatacggtatcggtttcctaaatctactttacaatattatcaaaccagaactttaggctgttccgtaatatataaggaaacgtaatacccgagtcatgatctgttacatattccatatatatatgttatcccctattactagtcggataaccatgccgcatgggtatggggtacccataatatccacagtagcccctgagaccttcgcagtcgaaaagataatcttctctcgaaccagattactccaaagccgagtgcttcaatcatctttgtcatggtctcccgagtacttttaccaaatctgaagactgtggagggctggaaaataaagtcaggtgcaccgactagatgcacctaataggtgtagcccccgacaatatggttaattgaataaaccaagcatatagtcaaggaataaataatccaaccaaccgagtggttttgataatcgtaatcaaccaagtgacttgatatcaatatatagcatatgcggtatgaatcctccaaataacatgatccgagtgatataccaactgctttgtaaaatatgatgagtgatatagcaaaatagctataaagaaacttgtatattgtgaataaagaaatttccaaagtattgggcatacgccatgcgcacactgctttaacagatgtgcttaagtctctagaagacacatggtttcaccacacctggaaatatatggcatatgtggtgtaaaatccgagtaaataaactcataaaggatttaccaaccgcctagaaaatgaccacaatatataatcagcctaagccataatattggtcaataaaaatgcacacttacgtggcgaaaagcaacgatattgtatccaatcagttgcttaaaaacccaaacagcaccatgactatattaaaaagtcagcggggcagctatataaagctttactgtttgacaccttttaagatgcattgtaccaactcctaaaaagttgagtaactgcggtataaaaggattttaaggtattgggcacttgatcacgcgcactttggcctaagcaaaaagtgcctaagtccctaaaaaaacgtgacaggccacacctgaaaatatgggctgcagacatattaggcctaggccaaaacatatgccctcgacaccctttaaaggatgacgcatataacatgctcccgagtaataaatcttccgggtaatatagaccaagcgtagctcatatgaatagcttctgatctgagtgattatcccttatgggatactccaaaatagatgtaacaattgaatcccgactggcgcaagtattcggttgatagcccttacggggaataataattggtccagtctttgagcatagaaaatagactcatgacaatgaatccatgtggaatgtatccggaacaagtccaaattggagatataatcctcacgcttgagttgatgagcccctgagcatatagcttgtccttctgtcatagtcaaaattgtctattggcaatagctgacgcagtcggcatggagatgaaatgaccaacatgaagacgaaattgctcatcagaagtaacggaagatgtcagtggtagtaaaaacagtgacaccaatcaaaggtaatgaagttgcataaccatggaggcgaagaaaccagtcagcgacagacagatcaactaacaatgaagatcaaaggcgatgacgaaatccatcaatcatgaagatgaagaaaatagttgacgacgacaaacgcaaccgacatgatgaagataacgatgtcggtgatccagtcaatagcagtgtagcaaccaatgataatgacaaagacgctcatcaacatttgcatagtaggtcaaccgtgaaggtgaaataataagtcggtgaagacataatcatccattagcaacaacggagatgtcagggccgatgaagcaaaggtgctggtgatgatgtcagtgacaataatccatcaaattaatgttatagctgttgtagatgcttcacttggaggagagttgatgttgttgcccaactcgtctaaaccgaaatatttgaagttgttgaagtagaatgtctgctccgaagcaaagatgaagataatgactcctggagttgactcgtgggttgatgaattgatttcttcagcttgacataaaatttgtcaaattttgagccttgtatttgtgtagcccccgactctttgattagttgggaaacaactgaacatagagtcgagaactatagcctcttgtcgtcgaataattattgcttgattgaagatatgtgttgaagatgtccaagtagaaatcatgaatgttggagagccacttgttgtagtaaaataacacggcatcgcatgccgagatgttgagattcacaacaacgtcatggttggtgatgtagcaaaacttgtgaagtagcagcaatagagtttgctggtaccgaagataataaagatgaagtcgctccaccatgatgacaaagttgtgttgccgtgatgaagtgaacacgagtcggcggtacgaggcggtagtgaagacgcgcagttgtgaagataaaagcactagtcggcggcggcataaccagtcggcaacggaagacgatgatgtccatcagtagtggtagctgtctaaaccagacgtagaggtgagggcactagtcagcagcagatgtagacagcttgcgttgaagatgatgatgcttattagcggtgatggtgatgtagccagccgtgaagaagatagcatcagttggcgtcataacaggccagccgtgcaggcggtgacaccagtcggcggcggacgaggcagccggtcggtgaaagcgtagacgcccaacaacggcagcataataggccagccgtgcaggcggaaacaccagtcggcggcggacgaggcggccggtcggcgaagacgtagacgcccaacaacagcggcataataggccagccgtgcaggcggaaacaccagtcggcggcggtcgaggcggccggtcggtgaagacgtagacgcccaacaacggcggcataataagtcagccgtgcaggcggtgacaccagtcggcggcggacgaggcagccggtcggtgaagacgtagacgcccaacaacagcggcataataggccagccgtgcaggcggaaacaccagtcggcggcggcgaaggtaagccggtcggtgaagacgtagacgcccaacaacggcggcataataagtcagccgtgcaggcggaagcaccagtcggcggcggacgaggcggccggtcggtgaagacgtagacgcccaacaacggcggcataataggccagccgtgcaggcggaaacaccagtcggcggcggtcgaggcggccggtcggtgaagacgtagacgcccaacaacagcggcataataggccagccgtgcaggcggaaacaccagtcggcggcggtcgaggcggccggtcggtgaagacgtagacgcccaacaacggcggcataataagtcagccgtgcaggcggtgacaccagtcggcggcggacgaggcagccggtcggtgaagacgtagacgcccaacaacagcggcataataggccagccgtgcaggcggaaacaccagtcggcggcggcgaaggcaagccggtcggtgaagacgtagacgcccaacaacggcggcataataagtcagccgtgcaggcggaagcaccagtcggcggcggacgaggcggccggtcggtgaagacgtagacgcccaacaacggcggcataataggccagccgtgcaggcggaaacaccagtcggcggcggtcgaggcggccggtcggtgaagacgtagacgcccaacaacggcggcataatacgtcagccgtgcaggcggaagcaccagtcggcggcggacgaggcggccggtcggtgaagacgtagacgcccaacaacagcggcataataggccagccgtgcaggcggaaacaccagtcggcggcggtcgaggcggccggtcggtgaagacgtagacgcccaacaacagcggcataataggccagccgtgcaggcggaaacaccagtcggcggcggcgaaggcaagccggtggtgatgttctgactgatccattcctggagcgtaagagataagcttaaagccatgaatcccttttatgcatatctggatctggatcctgcagaacaaacatataggatgagtagtatctgatataaatataatactcgagaaaaaatcaagtattttaaaatatttataaatatgtatttctcctcttgtcaattttgatttccccgagcagatgactctgtacgtttaaacactctgcccgactagtcataaccaccaagcatcgggagtcggcctaggcacttcccaaacatgcatatgagtgatatgagttcgtcattaatggaacaaagtttcacggattagaatttactactcaggtacttttgcaattattaagagcagaaaataaatttatctcatctctatgcttttgatttattccgaataatacttagcaccttgcgttactcggtccatccaacgagcccccgggtgctaggaatcggcccaaaggcaaccatccattggcaaaccaaacggaaagcataggaagatagaactccataactcgataggtacttttgtactcagattatgtcgcaagcaatcaagataaatattatgaaaattgtttaaaaaatacgatataacttctatagcccccgactcactagtcaacggcgaaccagttgatgtagtgaggcaaaggaaaagacaaaatatcatataaagaataaaataaatgatgacttagctttgtcgtattccctcgatgacagcagaagtagccgatgtgggaataaagtcgtccatcaataacaatgaagacaccagtcggcggcgacgaaggcggtcgacggtgaaagcgaagatgcccactaatggcggcataataggccagccgtgtaagcggaaacaccagtcgacggcaacgaaggtgagccaacggtgaagatgtagacatccaacaacggcggcataataggccagccgtgcaggcggaggcaccactcggcggcgacggaggcgggccggcggtgaagtcgtagacgcccaacagcggtggcataataggccagccgtgtaggcggagacaccactcggcggcaacggaggcaagccggcggtgaagtcgtagacgcccaacagcggcggcataataggccagccgtgtaggcggaggcaccactcggcggcaacggaggcaagccggcggtgaagtcgtagacgcccaacagcggcggcataataggccagccgtgtaggcggagacaccactcggcggcaacggaggcaagccggcggtgaagtcgtagacgcccaacagcggcggcataataggccagccgtgtaggcggaggcaccactcggcggcaacggaggcaagccggcggtgaagtcgtagacgcccaacaacggcggcataataggccagccgtgcaggcggaaacaccagtcggcggcggcgaaggcaagccggtcggtcaagacgtagacgcccaacaacggcggcataataggccagccgtgcaggcggaaacaccagtcggcggcggcgaaggcaagccggtcggtgaagacgtagacgcccaacaacggcggcataataggccagccgtgcaggcggaaacaccagtcggcggcggtcgaggcgagccggtggtggtgttctgactgatccattcctggagcgtaggagataagcttaaagccatgaattccttttatgcatatctggatctggatcctgccgttgttgttatcagcaatggcggtggcgaagacaagccggcaaagtggactcgcggccgatcgaccggaaagctgagacgcctcgactccatgaccagcattaatcgcctcaatagtgccgcgtaattatatgcgaacaacaacaaaaaataacaagagattaatctgagattaaaaatcaatatgataaataatgataaaactaggcgtccggcgctggacgagtagttagcgtgagcagatataaaaaattgctcaatggaaaatattacataaaaaggaaaataaagacacttagctttgttctcagtgtcctcctccgtatatgtgttaatggatggacatgggatcatatcggcagcttgtgacagacatgcactgtatgtggaacaagctggattataccgaattgaaaaccatctgtatgtgcagtatggcttgtgcttgcatgctgcgtgctatgcgtgcgtgagtccgccagccatctgggcaagacccaacagatgccgactgcttgcatcaatataatggcaatgtgtagtggcagtcggacatgcaaatccagtcacgagtcggtgctgatggctgagttgctttaattagtcatggttgatcagatcccaagtcggagaagattttggaaataatcgtcgcgacggtcgcgtgggacttggcttgatagtgatcaggttcctccgatggcagggcatgtatttaatggatgatcttgaaccggtgatgtcgaaaactaaatcgtcgaactcccagagattgatcttagatggcagggcatgcaacgacgcaaaccttcgggcgtgttcatgcaacatctcgactgatatttcttttttaagattgatctgaccacaggatggtgtcgacgaacatggcgatgaccggatgagaacgaagccatcttgagccttcccgactgatttgaatctgagccagagagaacttgttgaagttgtcggcgacgaggaagcgaaaactcccaaagcgaaaacgaagtcggcgactcatgaagttgattccatcgcactcgttgataggaaactcgacgcaacccctacctggcgcgccaactgtcgaaacatgaattcggcaataataaaacggggtagcgcacaagacctaaagtggatggatgcagagacaaaggatttagacaggttcaggccctctcaatgagaggtaataccctactcctgtttggggatttgaatccgccgggtgtagtatagatctgacgatcaggttgtctcatgccccctagagggcctcctgcccaccttatatagggtggggggcaggattacaagatagaaaccttaaccaatacggtatcggtttcctaaatctactttacaatattatcaaaccaggactttaggctgttccgtaatatataaggaaacgtaatacccgagtcatgatctgttacatattccatatatatatgttatcccctattactagtcggataaccatgccgcatgggtatggggtacccataatatccacaccggtctcctcccactccttcttctgtaggatcgaatcacaataactaagccaaccagagggggtgaatggttggtatacctaaaaaccgaaaacttttagtgaaaataaaagttaccctcgaaatcgacggagatcggtctgaccgagattgatctggatcgaagcgtagccgccggtctgaccggtgttgaatctctggtctgaccgccgaaatcacctgccgcgcctgctgccgtcgctggtctgaccgcccgtatgccaccggtctgaccgccgcttgccgccggtctgaccgcctgtatatcgccggttagaccgtcgaaacccggtgaaacacaaatcgaagaactcttaaagtagatgacgactttattgattctctctgtgtttacaaagtgcaccaacagcactccttataaaatttcgactaaactcgaaaccctaactcaaaactcaactcaattgctctccaaaaacgataccggaaagcctcacgctctccctctatttatacccgaggtaggcagcctaaagccacgaaccaaactcatactaagagtcctaaacaccttaggaaaccctctagtacaagaaagaaactttacataaccaatcgtaccaaatttggactccttccaaattcgactccgcatcccatacacatacaatacctccatcgtatgccatatagaatctccatcaaccacgtgcatcaactctagcctaggtatctcgcatgatctctgaccaccacggacgtcgtcttgtccccaagccgactcccggtccatcaccgcaaatactctcccgaggcatcgagtcacctacacattaaataaacaaagaaaccatattccgagaccaagctttctccaacttgactcattagtagcaaacaacagtattatatacgtaaggtatccatctagaagtcataatcacgaaataatcacggatatccaaacaaacaacccgaaaccgaaactgacacagagtcagccggtcagaccgcgggctgcgccggtccgaccgctcgatcaccgccggtctgaccggcatacacagtccagtttgaccggtcacataaaatgatagaatcctgcgatcacctgtgaattcaatcatctccaaaaccacttcatgaataaattccaaataacaaaaccaataatctccgatgcccaattgttcatcacagaataataatcaaaaacacctttgattttacaatctcctccttgatgaacacattggcaaacccatcaaaaatgttttggtgttcggaaaaataaaaacaaaagtggtaaaaagcacacttcgtacaaacgtatacatcgtgctcgaaaaatccaaaagaaaacttctcccccttttcaaaagaaagaaattctcaattgaaccaaaaacatgctcttctcaacaactctcctaaaattcaccttgcttctccaacaatccaaaaattttcatattacttatcccccttttgacaatgatttcatcatgcatagaaattatgttcattaatgttcaagagcttagcatatatatagcatatcaagtcatgtgttgcaataaaaagaagatgaacccatctataatataacatgcatgcattaaagtataaccatgaatcaaagattttacaattaagcttgaatcaacaatcaaaattcatgatttcatacgatttataataaacactaaacacatatacttattgcatttatcactctttctcaaataaactttagcacaaaataaccaagagaaaaatttttttcaactttttcttttcttgagcctttttgctcatatttttctcttttattccgggtacgtccctgtcgtcaagtctgtttctagggattcggcacccattattttgctcacatcgaatacgtcattgtcgtcaagactgtttccaaggattcggtattcattttttcatattttttattctcttttcacaataagcaattaaagctatttgaggaataacaagtcaataaagcatatatataaagcatttatagatcaaaccatatgctagcatgaacattgcatatttgcttaattcaagtatagaatttaagtgtcatgcatcatctcccttaaaagcaaaatctaaatctcatgaaaagactagaatacatacaagctatgctagagacaaataaaccttcaaagtattgctagcatgcacaagaaaataccatatgtataaacaaatatctcttttctcaatttttcattgtcatattattacttgataaaaccatgaggtacaaactccccctcaaaccatgccaaaaggatgaattattcccaattcatcacgaagaaaagcaaaacgatttaaatccaaaggtttagtgaaaatatcagcaagttgcaactttatgtccaaaaattgcaattcaacatctcccttctcaacatgatccctcaaaaagtgaaagcgaatatcaatgcgctatgtgcgtgagtgtcgaacaggattcttagcaatgttaatagcactagtattatcacaaaagagaggcactttctcaagagtaagaccataatctttcaaagtagataaaagccaaataatctgtgaacaacaactagcagcaacaatatattcagattcagcagttgattgagcaacactagattgtttcctagaagaccatgcaatcaatgatgtaccaagaaaatgacatgttctactagtacttttcctatcaattctacaaccaccaaaatcagcatcggaatatccacttaagcatatagaagatgaagtagaataccaaattccaaattccaaactcaagtgtatgattcaaatacctcattatacgcttgaccgcttgacgatgtgaagcacgaggagaagcttgaaagcgtgcacacaaacacacagcaaattgtatgtctggcctagaagcagttagatacaacaaagatccaatcatacttctattctccttttgatcaacagcttcaccatcttcatcaggatccaacacaggtgtagaaccaattggtgttgaaattggcttgcaattctccatcttgaaccgtctcaaaagatccttcgtatactttgtttgatgcacaaaagtaccttgaggtgtttgcttaatttgcaatcccaaaatgtacgataactcaaccatcatgctcatctcaaattccctgggcatagtttcagcaaaatctacaaccaacgcgtgagtcgaacaaccaaagataatatcatccacataaatctgaacgaacagttgattatcaccatgcttaagaacaaaaagcattttgtcaacctttcccattgtaaaacctttcgtaagaaaaaagttcttaagcctatcataccatgccctaggagcttctttcaaaccatacaaagctttagacaatttaaaaacatggttgggaaaatcaggattttcaaaacctggtggttgtttgacataaactttctcctgtataaaaccatttagaaaagcacttttcacatccatttgatacaatttaaaaccttttgaagcagcaaaagacaacaaaagtctaattgcctcaactctagcaacaggagcaaaagtttcatcaaaatccaaaccctccacctgggtaaaaccttgagcaacaagtctagctttatttctcacaatcaaaccatcctcattttgtttatttttgaaaacccacttggttccaataatattaagtccagaaggtggttcaactaaagtccaaactttgtttctctcaaaattttcaagttcttcatgcatggcgataatccacgattcatcagttaatgcatgtggcacatctttgggttcaaaagaagcaacaaatgcagaatttgcacaaacatcatgagtcgttaccttagaccttattgtccgctcacctatattaccaataatttgttccggcggatgtcgtcgttgaatgtgtaaaggagcaacaacttctgaagttgatccacgttctgtatcagtactagttgaagttgaattctctggaggaccatctcgatcagcatcaacagtacccgaacccgatgaccctagccggtctgaccgctcctcatgagccggtctgaccgctcctcatgagccggtctgaccggaggtgtgccggcggtctgaccggcctggcgcccggtttgaccggccgagccgacctcgtcatcgttgttgtcgtcgctcttgtcttcaaaaatacgaccatcctccctctgaacctgtgacaatgtacctgcaatatcggatttagtacctggactagcctcatcaaaagaaacttcgcaagtctcaacgattttgttagtctccaaaataagtacacggtaaccacgagtatgagcagggtaaccaagaaacaatacatcggtagaacgtgcctcaaacttatccaaatttccagatttcaagacaaagcatttgcaaccaaaaacacgcaaatgtgaaactttgggtttatgtccaaaccgaagttcataagaagtttttccaagtttagatctcaagaaaactcgatttgaaatataacaagcagtgttaatcgcctcagcccaaaattttctaggagttttatactcatctagccatctcaaccaaaacacgatttttcctttcaacaacaccgttttgttgtggaacacgaggagaagaaaattcatgttcaagacctctttcattgcaaaactgttcaaaagaagcatttttaaactcaccaccattatcacttcgaattcttttcaaagaaccaggaaattcaagatccaatcgaagaaacaaaccacgaaagtgttgaaaagcttcgtccttagttgccataaagaaaacccaagaatatcgagaaaaatcatcaacaataaccaacacataccacttacctccaacagattgcatgtcgcgaccgggaaaattgcctttttccgaacgctagtgtattaatccccgtcccaggaaaagccggggtacaccatacaaacatgatataaaagacacatctttattatatcgataatatttacattattacaaaggcacttaaggcctgacaatcaaaaataaacagcagcggactagcgggcctacggctccatcttcacaggcgctcaactggggtataagccaagactccacctaagacttcttctccaaagcttctcttactgaaggggggagaaagatagagcaagaatgagtacaaccacagtactcagcaagccacaccggcggatgcacgattaatgcaagggggtacaaggggtaatgatataggggttaagttttgcagtaaacagcatttaaaagtcacttagttgcccaaagccattttataaagacgatcctagagctacacagtattattaatcaaggccgtgaacccacacgaacctgccttaacccaaggcctacgatgattcagaccgaactggcaacccgaccctgggtcccagctcgtcccaagccaacccaggccaaccattccacattttagttcttaagcaaattttaagaattaaaacactgacttgggtacattgctcggcttgcccataaccgagggcgcggctattcgaatagattatactctgatcagaggtgtacatctttacccacaagacacatcttcctcacgtgtaaccacgtgccacataccaccacggtatacggacggaagacgtgacatagttcccaacccatcctagccataaacaagagtaccgacccaatcctacctacggccggaacccccgggacaggcaggcaggattgagctccctagcagcaggacaccagccctgtgccatgacatctcgactaccgggccgcagctcgtgtagccttcatttgtcctagagaatgtccatcgacccccgacttcatccatctccaatccgtgtacttttgtttataaccagactgagccacaaactaagccttacccactagacatgtggaagtacggtagtgctttgcaacagaggcccgagcttaatccttatagtggccggggtgctacttcccacaactggcatgcacccaaaccccaccgaaaaacaggttttaggggctttgaaagaggaagagaggggtatgtccaattccaccataagccaaccattccatagtatccaaatgatatgagatttcccaaagtctaaagttataaaaccacctaatgttgcctaattatccagcgaagcatctacctaagttcatactagtggaaccataaatagagtacccactagttggggttttattttcctagggtgaacaaggtaataataacaatagcaacaataataaggtcataacaaaggtaaataggcatggctaaataaaacagtgataacgcgggaatttaaataaagcgataatgcattaatttaaatcaaaataattttataaactgggattcaatatgctcaaggatgatgtgacttgccttgctcagagagaacggccttccgaaccttcggcgacgaccacgaaccacgctttgggaacctccggaacgatgaaagctacgcgaagcacacaagcaaagctacaagcctataaagaagcaataacaatacataaaaacaaagcacagggttctttaggttataacaaacattaagagacttgaacggatcgattcggagttcgtatgaccaagatatgatcatccgaagtttaatgctgttatatggggatttgcggattattataattaagctttgcaactataaaacatgtgtaagcgctagcctggaaaagacaggaaggctgcgccgttgacatgcggaccccacatgtcaacctaaaggaccgcggtagaccgagtacacagaggcggtccccgggtcgacggaagcagaccccgtgtgtcaaccgaggcgagtggccgacaaacggactccattaaacaacacacggcctgcacacgtggaaaccacgcggctaccgagcgggcacactaacacggacactacacggtcaccacccgcacgcgtgaacgactaccgacaccggtacacgggtaccggggtcgacgaccgcacaactggtacggggcgacaccggaagaacaaggacggggcagcgagaggggagaccttaccaccactcgacgaggcgagggaacgacaacgacgaacgggcgcggcggaggcggccgggaactacggagacgaacggcgaggggacgacttcggcggcgatcctaggacgaaggcgagacgcggccggcacgaggcttgacgacgcggagccgtggacgaagacgaggacggggctgcagcggctcgcttgacgaacgcggacgacggacgagaacggctcgacggagggacgaacgccacgacgaccgggaacgacgagaggacgacgacgacgacgacgaccgggaccggcgaggaggcgacgaggacagccggcagcggctgcacggggacgaggacggcgtggaacacgccgcagcgatgatgatgacggaggcggcgccgcgagacgacgagccgggcgaccgacgggacgtcgatcggcgaggacgaacggtgacgaggaaacgatgatggcaggcagcagcggctgagcggaggaggggacggcgtggaacgcgctgctgcgatgttggagaaggtggtggtgcagcggggcgacgagccgacgaggaggaatgggtggccgaaaggacgccggcgacgaagaggatggagaggccggcgcggcgacggcgttctggcgaaaccgaggagcagccggggtggagggcggcgtcgcggagccgagggaggtggtggcgatgtcggccggctcacgggaaacgcgacagtggcggccggaggtggaacagtggcggcaacgccactgttttgccggcgaggacgcgtctctggtgctttccccgcgaaacggagggctgaccgagggagaggaggtggctgcgaggccgagggagaagacggcgcggccggacggtgctccggcgaggagggagaggcggctggaggcggccggcgcggaggaaagagaagggcgacggcgggaacgcgcctccggcggtcaccgcgcgaaacggagggcaggccggggtggaggaggtggcggcgacgctggaggaggcgacggcgcggccggccggcgcacggtcgaggcggcacaggcggcttgtcgcgtcccaaatcgactctaaaattcaccctcgaaattgtgcaaaagaataagtaaaattcaatgaaagcctccaacaattaaaatgtgcaaagataaaagtcaaatgaggcttggaggatttttgtatatttcctaaaagcctaaaatgcttaaataaattttagtggaattttcagagcacaaataataattgaaaagaaataaacaaagtggaaaaggtttataaaaagaaaatcctaaaagaagtctgcttttcccccccctttttccctcttgggccggctcggcccattccctccctctccctctctctctctctccttccccgcggcccatcggcctccccgcgcgcgcgcgccgctgacaggcgggcccgcccgccgctctcgctgacgggtggggcccacctgtcatcttcctcctcccgccgcgcccgccgccagcgcccgtgccctagcgccgccgccgccgcggattccgccgcatcccgccttccccgcgcgccataatgaggggggaattattccccgcgtttccctctcccgattccccctcttttccctctctctctcccgcggattcgttcgaatcaagcccgtaatcctcgccggcgtattcaatggagccgaagatccccgcgcccgtttcctctctctccggccgctctttccttcccccggcgctataaaaacgttgcccgaactccgctctttcgtttccgccgcttgccgctcgctctcgccgtcggaatcgtgctagcgccgtgctcctctctctccgccgtcgccgtcgaccttcggttagccgccgccgtcgctccgctcttcttcccggctcggcgacccctccttcggcatcgccgcatcgccgccgaccccgtccgccgctccgcttcgcccgccgaccgccggagcaccgtcgtcatcatcttcccgaaccgcgccgccgtcttcctccgctccggccgccgttctcgtcgtcgtcgttgtcccggggtgagccaaggaccgccgttcgccttccccctttcctcctctctctcgggtgccactccgccgcgccgttggtcgccggcggcgaccatcggggcgcgggtgcacgccgctcccgtcggccgcgccggcgaggccgcccttgggcgcgccctcgcggctgccaagtgggcccggccgtcagccgcccgcgcccgcgggtgcggctgacgcgcgggacccacggcgccgacagccgccagccgcgtgcgcccggtccaccgtggaccgagcggctgacgcgtgggccccacttcccgtggacccggtccgcgcgcccgcccctcggctgacgcaataatccgtgtttttaattgaaaattaaatgaagaaattcgcaaatattcatttaaagagcatataaacttcaaatggccatatcttggccatttgaactcggaattggaccgttcaagtctctaatttttccttaagatgtaaagaacccatttttgtgctttgtttctgctgttatgtggagttatttagtgttaaagcctttttcttttccgttggtcgtgtagacgctgcagcttcggaagatccgctcttcgtggaagtcgaagccgtcgagtgggaaaacgagcaaggcaagacacatcatcttgatcatattgaatcccagtttataaaattatgttgatttaaattattgcattatcgctttatttaaattcccgcgttatcactgttttacttagccatgcctatttacctttgttatgaccatattattattgttattgttattattattaccttgttcgctctaggcaaacaaaacctcaactagtggactctctactcatgacaccactagtttaattttaggtagatgcttcgcaatctaattaggtaaccttaggtggttttataactttagacttgggaaatattcatatcacctggatactctggaatggttggcttatgttggaattggacacacacctctcttcctctttcaaaacccctaaaacctgttttcggtggggtttgggtgcatgccagttgtgggaagtagcaccccggccactataaggactaaagctcgggcctctgttgcaaagcactaccgtacttccacatgtctaatgggtaaggcttagtttgtggctcagtctagtcataaacaaaagtacacggattggagatggatgaagtcgggggtcgatggacattctccaggacaaatgaaggctacacgagctgcggcccggtagtcgagatgtcatacggcggagggttggtgcccaatgctaggggctcagttctgcctgcctgtcccgggtatcccggccgtaggcggaattgggtcggtactcttgtctaaggctaggatgggttgggaactatgtcacgtcttccgtccgtataccgtggtggtatgtggcacgtggttacacgtgaggaagatgtgtcttgtgggtaaagatgtacacctctgatcagagtataatctattcgaatagccgcgccctcggttatgggcaagccgagcaatgtacccaagtcagtgttttaattcttaaaatttgcttaacaaataaaatgtggaatggttggcctgggttggcttgggacgagctgggacccagggtcgggttgccagttcggtctgaatcatcgtaggccttgggttaaggcaggttcgtgtgggttcacgaccttgattaataatactgtgtagctctaggatcgtctttataaaatagctttgggcaaataagtgacttttaaatgctgtttactgcaaccctaaccccttatgttataattcctttgtactcccttgcaattattctgcatttgtgggtgtgtcttgttgagtacggtggttgtactcagtcttgctcaattttttccccaagcccagatgaggagttccttgaagatgaaggctttggtgtctagctcgtgcctgccgtcaagcgcctgtggtcgtcgccctagtcttccgctgtttctcgttgtctttgagtgtgctgggccttcgttgcccgtgtaataattttatttacgcttccgcttgttaaactctgaattgtatcaacttttggtgtaccttgcctcctgggacaaggaataatacacgcacgtcaggaatgcctgttgggtgatttccggtcgtgacaagttggtatcagagcctcccttgaccctaggacgagccgtagatcccaagccttagctatattttcaaaaataaaaatcctctgttatttgtgaaaacccgctattctctctttgtcttgctgcttcacttatcatcaaaatctgatcttttaaatgttgcttttcttttgtttttgtttgtagatggccggcagcgttacccgtcgtggtttgcacatgactggcttcgtcttggagctgcgaggcatgtgcgtggtcttggggtatccacatggagtggattaccaggccaggccgctcccggatcaggagggtgaggatgcagagcctcacgctggttgggaggtcactgcagtgatcctctccggctctcccgagcggacttcgctggcagtcaccgcgggtggagattccttccccgccgcttgccagaacgccgctctcctcgccatcggcacccttcaccagcgctacccggacgagttgcagcactcgccctaccgctaccacccccgtcgcggaggagccagcgaccacgccaccttccgagacgccagctcggaggatgacgctaccgtcgtgcatctggcacgcatggtggaggcgtacgacgcggctcgtatcgacttccaccagatggtgcgtcgtggcatggtggagaacaacctgaagatcctggagctgcgtcaggagaacctgcagctcaagaaggacctcgacgcgttggaggcgcagctgcatcagctcaagatcgcccagggagagatcagccgtcccaagcgtcgccgcgtctgccgcagccagaagatcaccgcccgcaagagcacctccaggcccgagcttgttcgtcagtccctggcgtggacctgcttcgtcgagacccctcgtgccgagcctgcgcccgtggttccccaggagggggaagcctccggcgttggtagctcggagggtgcgctgttgctcaccttccgtcctggcccgtcgcagcggtagacgagcagttagtaggcttgcgcgtgtgtttttcctcgtttgtcttcttgagttgtgtggggcatggttacaccggtgtgtggtgtaactatgtcggagcctgtcttattttatttgcctaagcaacttgaaccttaatgaaccaatttaatagcagtgataaatttaagaataatagtagtcgtgggtggttagtttaatcgtcagctcttcttctctgtttgctggttctatgtggggttttcagatggtgacgaccaggagaaatgttaacaccggtgaaggcaaccaacccgagggcagcaaccccaaccaccaaggcaatccacctccaccaccaccacctgacaccaacgccattctcacccagatcctcgcccaacaagccaatatgatgaatgctttcctccaccacctccaaaatccaccacaacagaatgctccaccaccacccccacaacactctaaactcgccgaattcctccgcatccgcccacccaccttctctagctccaacaatcccgtagatgcgttggattggttgcatgccgtggggaagaagctagacacggtgcagtgcagtgacgaagagaaagtcatcttcgccgcccaccagctgcaagggcccgcatctctatggtgggaccatttccaggctacgcagccagagggacagccgattacttgggctcgcttcaccgccgctttccggagaacccatgtgcccgccggagtcgtggctctcaagaaaagggaatttcgagagttgaagcaaggcaaccgctccgtgatggagtatttgcatgagttcaacaatctggcccggtacgctccggaggatgtgcgggaagacgaggagaagcaggagaagttcttggcaggaatggaccctgagctgtccgtccgcttagtctctggggactatccggattttcaacgactggtggacaagagcatccgcttggaagccaagcacaaggagctggaatcgcacaagcgccgcttggcgaacttccgtaatcagcagggtgctaaccagagggtccgctacaccaatccctacccagggggatcctcctcgcaacagcagcagcagcagcaacctcgttccgcgcctcgacctcaattcgtggtgcgcgtcccacagccgcagcagcaacagaatcagcaagggacccgtgcaccccgtcctcctacgccaactgtgcagcccgttcaaggccgcagggacgctcaaggtcagcagcgtctgtgcttcaactgcttcgagcccgggcactttgcggataaatgcccaaagccaaggcgtcagcaaggccaagcgcctccccgctccaacaacggtggcaaggacgtcatccgtggtcgtgtgaatcacgtgacggccgaggacgtgctgacaaccccagacgtcatcgttggtacgttcctcgttcattccatccccgctacaattttgtttgactctggagcttcccactcgtttatatctgtgccattcgtggggagaaatcagttgggggtagaaaggcttagaaaccctctgctcatcaccacccctggcggggttatgacagcaaagtattatagccctgccgttcctatagaaattcagggaattccttttccctcggatctgattctgctagacaccaagaacttggatgtgattcttgggatgaattggttggctcaattccaaggagtagtggattgcgcgagacgcactgtcactctgtaccgaggaccagaacagccggttgttttctttgcacctccaacctctgtcagaagttcagaactgcatcagataggtctgtcagaaatccccgtagtcagagagttcggagacgtgtttccggaagaactacctggtatgccgcccaagcgagagattgagttccggatagatcttgctccaggaaccactcctctgtacaagcgaccctaccgtatggcagcaaacgaactggccgaagtaaagaaacagttggaagagttgaaagaaaaggggtatatacgtccgagtacttccccgtggggtgctcctgtgatttttgtagagaagaaagacaagacgaagaggatgtgcgtcgactacagagctctcaatgaagtcaccatcaaaaacaagtaccctcttccccggatcgatgatctgttcgatcagcttaaaggtgccactgtattctccaagattgatcttcgttccggatatcaccaattacgtattcgtgaagaagatattccgaagaccgcattcactacgcgatatggactgtatgaattcacggtgatgtcgttcggtttgaccaatgcgcctgccttcttcatgaacttgatgaacaaagtgttcatggaatacttggataagttcgttgtggttttcatcgatgacattctgatatactcacaatcagaggaagaccatcagcgccatctccgtctggtgttgggaaagttgcgggaacatcaattgtatgccaagctcagcaagtgtgagttctggttgtccgaagtcaaattcttggggcacgtgatatctgctaaaggagttgctgtggaccccgaaacagtgaccgccgtcaccgattggaagcaacccaagacagttactcaagtccgcagtttcttaggtttggcaggatattaccggagattcatcgagaacttctccaaaatcgctcgacccatgacacagttgttgaaaaaagaagagaaatttgtgtggagcccgcaatgcgagaaggcgttccaaactctcaaagaaaagctggtttcctcgccagtgttaatcttgccggatactcgcaaggatttcatggtgtactgtgatgcttcgcgccaaggattggggtgcgtgctcatgcaggacggccatgtggtagcctatgcctcacgccagctacgacctcatgaaggcaactaccctacacatgacttggagttagcagcggtggttcatgctctaaaaatctggcggcactatctcattgggaaccgctgtgaaatatatactgatcataagagtttgaaatacatcttcactcagtcagatctgaaccttcggcaaaggagatggttagaactcatcaaggattatgatgtgggaatacactatcatcctggtaaggccaacgtggttgccgacgctctaagtcggaagagccactgcaacactctcaacgtccgtagcattccgcccgagcttagtcaacagatggaagccctgaacctaaacatagttggtcgcggattcttggctgcgttagaagcaaagcccaccttgctcgatcaaatccgcgaggctcagaagaatgatccggacatgcatggactcctcaagaatatgaaacagggtaaagccgctggtttcacagaggatgaacacggaaccttatggaacggaaagcgggtatgcgttccagatagcagagaacttaaacagctgatacttcaggaagctcacgaaagtccttattccattcacccgggcagtaccaagatgtacttagacttgaaggagaaatactggtgggttagcatgaagcgggaaattgcagagtttgtggctctatgtgatgtgtgccagcgtgtcaaggcagaacaccaacgaccggccggacttctccaacctctccaagtaccggaatggaaatgggatgaaattgggatggatttcatcaccggacttccaaaaacccaaggtggatatgattctatatgggtaatagtggatcgattaaccaaggtagctcgattcattcctgtgaagaccacctatggagggaacaaactagcggagctctacttcgctaggatcgtgagtctccatggtattcccaagaaaatcgtatctgataggggaagccaattcacctctcacttttggaagaagctccaagaagagctgggtactcgattgaatttcagcaccgcatatcacccgcagacagatggacagaccgagcgtctaaatcagatcctagaagatatgcttcgcgtatgtgtcctagatttcgggaagacttgggataagagtctcccctatgccgagttttcctacaataacagctaccaagccagcatacaaatggcaccctatgaagcgttgtacgggcgcaaatgccggacaccgctattgtgggaccaagttggagaaagccaagtgttcgggactgatatcctgagagaagccgaagctaaagtcagaatcattcgggataatctaaaggtggcacagtctcggcagaaaagttatgcagataaccgtcgtcgtgatctggaattcgcagtggatgattttgtgtaccttcgggtcacgccattgcgaggtgtacacaggtttcagacaaaagggaagctcgcacctcggtatgtgggtcccttccgtatcatcgctcgacgcggagaagttgcttaccagctggagttgcccgcctccttgggcaacgtgcatgatgtgttccatgtgtcgcaactcaagaaatgtctccgagtgccatccgagcaggccgactcagagcaaattgaagttcgcgaagacttgacctatgtggagaggccagtgaaaatcctggacaccatggagcgcaggaccaggaaccgagtaatccgcttttgcaaggtccagtggagcaaccacgccgaagaagaagctacgtgggagcgcgaagacgagttgaaggcagcccatcccgatctcttcgccagttcttccgaatctcggggtcgagattccgtttaaggggggtaggtttgtcgcgtcccaaatcgactctaaaattcaccctcgaaattgtgcaaaagaataagtaaaattcaatgaaagcctccaacaattaaaatgtgcaaagataaaagtcaaatgaggcttggaggatttttgtatatttcctaaaagcctaaaatgcttaaataaattttagtggaattttcagagcacaaataataattgaaaagaaataaacaaagtggaaaaggtttataaaaagaaaatcctaaaagaagtctgcttttcccccccctttttccctcttgggccggctcggcccattccctccctctccctctctctctctctccttccccgcggcccatcggcctccccgcgcgcgcgcgccgctgacaggcgggcccgcccgccgctctcgctgacgggtggggcccacctgtcatcttcctcctcccgccgcgcccgccgccagcgcccgtgccctagcgccgccgccgccgcggattccgccgcatcccgccttccccgcgcgccataatgaggggggaattattccccgcgtttccctctcccgattccccctcttttccctctctctctccctcggattcgttcgaatcaagcccgtaatcctcgccggcgtattcaatggagccgagatccccgcgcccgtttcctctctctccggccgctctttccttcccccggcgctataaaaacgttgcccgaactccgctctttcgtttccgccgcttgccgctcgctctcgccgtcggaatcgtgctagcgccgtgctcctctctctccgccgtcgccgtcgaccttcggttagccgccgccgtcgctccgctcttcttcccggctcggcgacccctccttcggcatcgccgcatcgccgccgaccccgtccgccgctccgcttcgcccgccgaccgccggagcaccgtcgtcatcatcttcccgaaccgcgccgccgtcttcctccgctccggccgccgttctcgtcgtcgtcgttgtcccggggtgagccaaggaccgccgttcgccttccccctttcctcctctctctcgggtgccactccgccgcgccgttggtcgccggcggcgaccatcggggcgcgggtgcacgccgctcccgtcggccgcgccggcgaggccgcccttgggcgcgccctcgcggctgccaagtgggcccggccgtcagccgcccgcgcccgcgggtgcggctgacgcgcgggacccacggcgccgacagccgccagccgcgtgcgcccggtccaccgtggaccgagcggctgacgcgtgggccccacttcccgtggacccggtccgcgcgcccgcccctcggctgacgcaataatccgtgtttttaattgaaaattaaatgaagaaattcgcaaatattcatttaaagagcatataaacttcaaatggccatatcttggccatttgaactcggaattggaccgttcaagtctctaatttttccttaagatgtaaagaacccatttttgtgctttgtttctgctgttatgtggagttatttagtgttaaagcctttttcttttccgttggtcgtgtagacgctgcagcttcggaagatccgctcttcgtggaagtcgaagccgtcgagtgggaaaacgagcaaggcaagacacatcatcttgatcatattgaatcccagtttataaaattatgttgatttaaattattgcattatcgctttatttaaattcccgcgttatcactgttttacttagccatgcctatttacctttgttatgaccatattattattgttattgttattattattaccttgttcgctctaggcaaacaaaacctcaactagtggactctctactcatgacaccactagtttaattttaggtagatgcttcgcaatctaattaggtaaccttaggtggttttataactttagacttgggaaatattcatatcacctggatactctggaatggttggcttatgttggaattggacacacacctctcttcctctttcaaaacccctaaaacctgttttcggtggggtttgggtgcatgccagttgtgggaagtagcaccccggccactataaggactaaagctcgggcctctgttgcaaagcactaccgtacttccacatgtctaatgggtaaggcttagtttgtggctcagtctagtcataaacaaaagtacacggattggagatggatgaagtcgggggtcgatggacattctccaggacaaatgaaggctacacgagctgcggcccggtagtcgagatgtcatacggcggagggttggtgcccaatgctaggggctcagttctgcctgcctgtcccgggtatcccggccgtaggcggaattgggtcggtactcttgtctaaggctaggatgggttgggaactatgtcacgtcttccgtccgtataccgtggtggtatgtggcacgtggttacacgtgaggaagatgtgtcttgtgggtaaagatgtacacctctgatcagagtataatctattcgaatagccgcgccctcggttatgggcaagccgagcaatgtacccaagtcagtgttttaattcttaaaatttgcttaacaaataaaatgtggaatggttggcctgggttggcttgggacgagctgggacccagggtcgggttgccagttcggtctgaatcatcgtaggccttgggttaaggcaggttcgtgtgggttcacgaccttgattaataatactgtgtagctctaggatcgtctttataaaatagctttgggcaaataagtgacttttaaatgctgtttactgcaaccctaaccccttatgttataattcctttgtactcccttgcaattattctgcatttgtgggtgtgtcttgttgagtacggtggttgtactcagtcttgctcaattttttccccaagcccagatgaggagttccttgaagatgaaggctttggtgtctagctcgtgcctgccgtcaagcgcctgtggtcgtcgccctagtcttccgctgtttctcgttgtctttgagtgtgctgggccttcgttgcccgtgtaataattttatttacgcttccgcttgttaaactctgaattgtatcaacttttggtgtaccttgcctcctgggacaaggaataatacacgcacgtcaggaatgcctgttgggtgatttccggtcgtgacacggctggaggcggccggcggcgtgggagagagaggagggcggcggggagatggctagggaccacggggaggctcgggagggggctaaaacgagagaacgggggatgaggatcccattttatatgagagaagagggagccggccacgggggaggtcggaacggcggcgggaatggcggccgacggccatggaaagcggccggacttggcgcgtccgttcccggggattgaagacacgaatcaagggggaatttgggggcaattgaagaggattcaatggggattaaaaccccccaattaattttggaattggccaattgaatcaagcggatttggaggagggagcgagctaggtttccgggagagagagagaggtggccgggcggctggaggagggagacgacgcgcctaacgcgtgggccccacgcggtcgggcgcgcggtcagcgcgcggcaacggcgcgcacgcgcgcgcacgcgcgcgcacgcgcgcgcacgtgcgcggcacgggcgggagggcgccgctcgggttgggctgggcggccggcccaggaggagaggagggggaggcggcttgggccgggcaggccgggaggggggggagagacagcccgggagagagagggaggagggagctgggccgaggggaagggggcccaagaggagggagagaaggagagggagagaaagagagggaggaaagggagacttcggccgcgggccgaggggagagagggaggactttgggccagacttggcccaaaggaggaaggagggttatttttaggtttttctttttaataaactttgttaattgtttttgttgcttaataattatttccggtgctataaaaattcaagtaaaatttgagggctccttttagaccaaggagaatttaacaaaaattctccgggccacatttgaatttttcttgcacgtattttagtgtttgccaatttctttccgaattttaattaattctattattccttttagaaaatgatttttaattcgggatgaatttatcaggacgtgacaaatccaccccccttacaagaatctcgtccccgagattcgaggaggctagcaagaagataggttgggcggtcttctcttcttgtctgacttcttccgtcgcgtcttctataacaaacttgcctagcaaaactcctccactctggactgcttggctcgatctcctgttgcagatggaatcttctcttcacctgacttgtccctggttgaacctttagctgacttcgactgggttgtggcacttgatgatggggcttcagatccagaacttctcatagttcatatctttggcgtcaacctcatacaacttacccacttcatgtcatgcgtcaacactagcttgtcattactaggataccatgtttgtcatcataagaatatcatgcttatcatttacttctaacttgccactgaatgctttggactatgatgtcacgcttatccagcataccatgtttgacaacttgtcactaactgcatcatattagctttcctggcctccgggtgctagatactactgctattcgatgcaagggtcgataacttttgcctttgaattacgtttctcaaaagaaccaacttatcccacttgacatgctttgacatctttctaaatgactttactgctgaacttgttattgtctgatcgttttcctgccaaatctgaagcttcgttgttagatgtgattttaatctgacctctgtaaactatcttcgaacatatcacttggttcataactgggaatagctcccatgaacaagcaactcggattcacttgctttacattcagtttacttcccactattcacttcatgttgtcctcagttagcattcaacgtattcctttacacctttgaccttgatgtgttctttcccgattcctcttatcaatcacctttcgacctacttctttgcctggtaataaacatctttttcgatatctcctatcagtcatcttttgacctttgtcaactaagtactcttcactccgagagttgtggatgcttctggtgacgatgtggtacttgagcctgctgcctttcagagaaaccttcaagtggttcgtcaaaagctagactggcggttgttgcctttgatccaaagaggacacatctgaaactctcagtccaaacaaaagtctctttggctttttaatccgacacagtttaattggttttcttttccatcaacaggttggttattaactcgaggttagaacatagttcctctggaatgagaccctaggtctcctttgacagtaaacaattatacgcatgatcccatatcagcatcttccaaaataatcctcatagaacttgtttttatcacacatgtctcccttattacatgaatacaaggcactgccttaaacaaaaagggaaggtgcttaacatcggtacattgtatcctcgacaggaatcatccataaacgtagcaagctcattatttataatcatgaatatatttatttattacatgattgctgcaaactcccgattacagtgataagtagcgaactgaaaatcacaaacatggctacatagctggcattgttctagtgactgcatccttgattggttctgtgatgatatgataggactgcatattgctatcattcacaggagaagcttccttctgattgctggttgaagcgaataacggtcttctgcttggtatcgccctcctgaggttgattgccctttgctcggcctggagtaggtcggggagagacacaacttcttccatcgacgacaattctttgctaaggccgtcggtgcagagaatggttggtgctgaaggtattattgctatgatttattgcagagtcaggtgcagcaggaggagcattggtgctgtggatgatatcgtcgatgttgttgttggagctgactagctgatgagacaatcgtagggttgttcgttggatttctgcggtcttggtcaacaacacactgagttggcaatccttgggcacatggtttgtaccttcgcatagaaaacatgtgaccttgcgggtgggacattcacctggtggatggtcttcctcacaatgagggcagagtgtgagacacatgctagcaacatgtccaatttctccacaacgggggcatgcttttgattccatctcttcctcgccgagatgtcggggagactcatcttcatcatccgaggagacttgatctgacccttcactatcagatactctgccaccatggcttagaaggtgctgggtcaactgtcgtgcacctcggaaggtatttcctctttgccgtctaggaatagttatccctgctggaggccattcggtgctggtaatagtcatcttacgtacttcttcttcagttcgcatcggtgcttttctcttctgattcttactcttcttgcctttggcttgcttagcacgtgaccccacgtggtacgaaaggctaggaggaaaagcatttctcgggattcaatggattctctccattgggctctctactttgcacactaggctgcaagcttgacttggtgtgaggaggctggtttagcgatgtctgccctgctaaaccaaaggaaggggcttctttggcatatacccatggacaattcagggcatagtgtccttgttctctacaatcatgacaaaaggggacatgctcctctggcattggaagctcattgacctgggtggcaaatgcttgatcaaacacatactgattttggtcttgacttccaaccaatggtagctgtgaactaagcagtatgcttggaatggaccaagggtgtgccctggttaactctcttgaggccagtggtggattgagttgaaaacttgagttacttgaggcatacccgctgacattctttcctttttctctgttaaacatctgttacagggattgaggtgagagaggaaacaagccaggaaagaatagaccagagctagagataggaccttaaaggaactaactcttcttgttgatgtgttgtttgttgcacttattctgcaagttgattaagcaaacaacctagcatggttacatcacaacccactgatgcaaaccacgcgctacacacgcaagcaaggaaacacacgacaaacgaaacactagagggtggcttaggttctgcgatgggttcccaagatcttcactcttgcttcacatctggcttcactgcttcctttgcttcgctaagggatccaacagtcttctggagttttgacggacaattgacgccatcttcttcttcgcaaaactaaccatctagtactagttgaaagtccgaagaaggaaaaacggagtaaaccttttgcaaatagcattaggggaaggagaaaaaaggaactttcgcaaatagttttatttataaaatatgtccttaggttttatccatttggcttaacctacagtcgggatggctctgacaccagcttgtcgcaaccgggaaaattgcctttttccgaacgctagtgtattaatccccgtcccaggaaaagccggggtacaccatacaaacatgatataaaagacacatctttattatatcgataatatttacattattacaaaggcacttaaggcctgacaatcaaaaataaacagcagcggactagcgggcctacggctccatcttcacaggcgctcaactggggtataagccaagactccacctaagacttcttctccaaagcttctcttactgaaggggggagaaagatagagcaagaatgagtacaaccacagtactcagcaagccacaccggcggatgcacgattaatgcaagggggtacaaggggtaatgatataggggttaagttttgcagtaaacagcatttaaaagtcacttagttgcccaaagccattttataaagacgatcctagagctacacagtattattaatcaaggccgtgaacccacacgaacctgccttaacccaaggcctacgatgattcagaccgaactggcaacccgaccctgggtcccagctcatcccaagccaacccaggccaaccattccacattttagttgttaagcaaattttaagaattaaaacactgacttgggtacattgctcggcttgcccacaaccgagggagaagacggcgcggccggacggtgctccggcgaggagggagaggcggctggaggcggccggcgcggaggaaagagaagggcgacggcgggaacgcgcctccggcggtcaccgcgcgaaacggagggcaggccggggtggaggaggtggcggcgacgctggaggaggcgacggcgcggccggccggcgcacggtcgaggcggcacaggcggctggaggcggccggcggcgtgggagagagaggagggcggcggggagatggctagggaccacggggaggctcgggagggggctaaaacgagagaacgggggatgaggatcccattttatatgagagaagagggagccggccacgggggaggtcggaacggcggcgggaatggcggccgacggccatggaaagcggtcggacttggcgcgtccgttcccggggattgaaggcacgaatcaagggggaatttgggggcaattgaagaggattcattggggattaaaaccccccaattaattttggaattggccaattgaatcaagcggatttggaggagggagcgagctaggtttccgggagagagagagagaggtggccgggcggctggaggagggagacgacgcgcctgacgcgtgggccccacgcggtcgggcgcgcggtcagcgcgcggcaacggcgcgcacgcgcgcgcacgtgcgcggcacgggcgggagggcgccgctcgggttgggccgggcggccggcccaggaggagaggagggggaggcggcttgggccgggcaggccgggagggggggagagagaccgcccgggagagagagggaggagggagctgggccgaggggaagggggcccaagaggagggagagaaggagagggagagaaagagagggaggaaagggagacttcggccgcgggccgaggggagagagggaggactttgggccagacttggcccaaaggaggaaggagggttatttttaggtttttctttttaataaactttgttaattgtttttgttgcttaataattatttccggtgctataaaaattcaagtaaaatttgagggctccttttagaccaaggagaatttaacaaaaattctccgggccacatttgaatttttcttgcacgtattttagtgtttgccaatttctttccgaattttaattaattctattattccttttagaaaatgatttttaattcgggatgaatttatcaggacgtgacattgcactcttgctggaccaacagtgtccatatgtaatagctgtctcggtgcatccgtcatcacagaaacaataggagtatatgaagaagcaaccatcttagcatgacgacacggtgtacaaaccaaatcaagatctttcttaagtttaggcaaaccacgaacaagatccaaaccacttaacctagtgagatgatcaaaaccaacatgttcaagtctaagatgccaaaacatcacatctttatcaaacctagcaaccaaacatgttataataggtgaaacaggattttcaaaatcagctttaaacacacttccatagcgagaaatattcaacacaaaatcaccacaagaatcaaaaactttacttccagttttcttaaagtgaacctcaaaattttcatcaacaatttgtgaaaccgaaagcaaattgtattttaagtcctcaaccaaagctacattcttcaattcaaaattttcatttaccttaaccaaacatgtaccgagaacggcacttgtagaaccatcaccaaagataatcgattcagtcttagatgcctttttgagagaggagaatcagtttttatcaccggtcatgtgctgcgaataaccggaatccacgagccacacgttctccttccttgccaccaaagcctacacacaagcagaagtcgaagcctcagtactggggttagatgataataaaaatttaggaaaccagtactgagacacacgaccagaagatccaataggcatatatccacgtgcaaaatcaattttagaattttcagaaaaattcctccgaggccggtctaaccgaggtacagtggccggtctgaccgcctctgtactgccggtctgaccggtcgccggtctaaccgcgggacccactgcggtctgaccggtttcctcgagggaaaactgtcacgtcctgataaattcatcccaaaataaaaatcatcttctaaaaggaataatagaattaattaaaattcgaaaagaaattggcaaacattaaaatacgtacaagaaaaattcaaatgtgacccggagaatttttgttaaattctccttggtctaaaaggagccctcaaattttagtggaattttcagagcacaaataataattgaaaagaaataaacaaagtgaaaaggttttataaaaagaaaatcctaaaagaagtctgtttcccccctttttttccctcttgggccggctcggcccattccctccctctccctctctctctctctcctcccccgcggcccatcggcctcccccgtgcgcgcgccgctgacaggcgggcccgcccgccgctctcgctgacgggtggggcccacctgtcatccccaaccccgcgccgcgcccgccgccgcgtccgtgccctagcgccgccgccgccgcgaatcccgccgctcccgtccaccccgcgtgcaatcaagaggggggaattaatccccgcgttcccctcccccgtttccccctctttcccctctctctctccctcggattcgttcgaatcaagcccgtaatcatcgccggcgcaatcaatggcggccgaaatctccgcggccggtttccttcctccccggccgccttctctcccttccgacgctataaaaacgttgccccgagtccgctctttcgtttccgccgctcgccgcttactctcgccgtcgaaatcgggtcgcgccgtgctcctccctctccgccatcgccgccgagctccgttccgccgccgccgccgctccggacttcctccttactcggcgacccctccgtccgttcgccgcgacgccgtcgatcccgtccggccctccgttcgcccgtcgaccgccggagcaccgtcgtcatcgtcatcccgagccgcgccgccgtcttcctccgctccgtccgccgtttccaccgccttcgccgtcttggggtgagccgtggaccgctccgttcgtttcccccttccctcctctctcttgggtgccgctccgccgcgccgtttggcccggcggcgaccatcgggggcgggcgcgctcctcccgtcggccgcgccggcgaggccgccctcgggcgcgccctcgcggctgccaagtgggcccggccgtcagccgcccgcgcccgcgggtgcggctgacgcgcgggacccacggcgccgaccgccgccagccgcgtgcgcccggtccaccgtggaccgagcggctgacgcgtgggccccacttcccgtggacccggtccgcgcgcccgcccctcggctgacgcaataatccgattttttttaattgaaaattaaatgaagaaattcgcaaatatccatttaaagagcatataaacttcaaatggccatatcttggccgtttgaactcggaattggaccgttcaagtctctaatttttccttaagaagtaaagaacccatttttgtgctttgtttatgctgttatttggagtttattagagtaaaagccttttcttttccgtcggtcgtgtagacgctgcagcttcggaagatccgctcttcgtggaagttgaagccggtgtttgggaaagcgagcaaggcaagtcacatcatccttgagcatattgaatcccagtttgtaaaattatgttgatttaaattattgcattatcgctttatttaaattcccgcgttatcactgttttatttagccatgcctatttacctttgttacgaccatattattattgttattgttattattattaccttgttcaccctagattaaacaaaaccccatctagtggacactctatttatggttccactagtttaaatttaggtagatgcttcgcaatttaattaggcaacattaggtggttttataattttagactttgggagttctcatatcttttggacaccatggaatggttggattatggtggaattggacatacacctctctttctctttcaaaacccctaaaacctgttttcggtggggtttgggtgcatgccagttatgggaagtagcaccccggccactataaggattaagctcgggcctctgttgcaaagcactaccgtacttccacatgtctaatgggtaaggcttagtttgtggctcagtctagtcataaacaaaagtacacggattggagatggatgaagtcgggcgtcgatggacattctccagggcaaatgaaggctacacgagctgcggcccggtagtcgagatgtcatacggcggagggttggtgcccaatgctaggggctcagttctgcctgcctgtcccgggtatcccggccgtaggtaggattgggtcggtactcttgtctaaggctaggatgggttggaaactatgtcacgtcttccgtccgtataccgtggtggtatgtggcacgtggcaacacgtgaggaagatgtgtcttgtgggtaaagatgtacacctctgatcagagtaaatctattcgaatagccgagccctcggatatgggcaagccgagcaatgtacccaagtcagtgttctaattcttaaaatttgctcaacactaaaatgtggaatggttggcctgggttggcttgggacgagctggaacccaggtcgggttgccagttcggtccaaatcatcgtaggccttgggttaaggcaggttcgtgagggttcacggccttgtttaataatactgtgtagctctaggatcgtctttacaaaatggctttgggcaactaagtgacttttaaatgctgtttactgcaaaacttaatccctatattattattcccttgtacctcccttgcattaattatgcatctccggtgtggcttgctgagtactgtggttgtactcattcttgctcaatccttcccctcttcagtaagagaagctttggagaagatgtcttaggtggagtcctggcttataccccagttgagcgcctgtgaagatggagccgtaggcccgctagtccgctgctgtttatttttgattgtcaggcctggagcgcctttgtaataatgtaaatactatcgatgtaataaagatgtgtcttttatatcatgtttgtgtggtgtaccccggcttttcctgggacggggattaatacactagcgttcgggaaaaggcaattttcccggtcgcgacaagctggtatcagagccatctcgactgtaggataagccaagtggataaaacctaaggacatattttataaatgaaactatttgcgaaagctcctctttttctccttcccctaatgctatttgcaaaaggtttactcccttcttccttcttcagatttcaactagtactagatggtcaggtttgcgaagaagaagatgtcgtcaattgtttgccgaagctccagaagactgcaggatccgctagcgaagtggaggaagcagtgaagccagctgagaagcaggagtgaagatcttggagaacccgtcgcagaacctaagccgccctctagggtagagtcgttagtcgtgtgtttccttgtttgtgtgtgtagcgcgtggtttgcatcagtggggtgtgatgtaaccatgctaggttgtttgcttaatcaacttgcagaataagtgaaacaaacaacacatcagcaagaagagttagttcctttaaggtcctatccttagtttctaatctgtctctcccctttgttttccctctctccctctccaaacctttgcaacagatggctgacaatgagaagggcaataaggtcagaagtcaggacattggtacctcaagctcccgagtgaatgaagcaccagacaccagttgtgtagcagtggtccaacacctgattaaccagaacaaattgcttatagagatactacagcagcatcggatgccaattttgaacccgagtcggatgcaacctcaagtacagttggaggcagtccaagcactcacaccacaagtcagcgcaccgccaacatcccagaaggcccctcatgccatgccacatgttgacccaaaagaagcaagtatcatctgttttatgtgtgatgagcaagggcactacgcaaggaactgtcctcagcagaaaagaaaagcaccaatgcgaaccgaagatgaagtccgtaagatgatcattaccagcacagaatggcctccaccaggaatgaccagacgtcagagaagaaataccttccgaggtgcaccacagttgacagaacatcttttagctaatggaggtagagtgtctgatagtgaagattcagatcaagtctcctcagatgatgaagatgaaatggaacgtaaggcatgctctcgttgtggagaaatcggtcatgtcgccagctcatgtgccactatatgcgttcattgcgaggaagaccatccacccgacaggtgtccaacgagcaggatcacttgtttcttttgtgaaggaactgatcatgtaccaaaagattgtcaattcagttttctgctgacgaagaagatggctaaccaacccgccagttccaacggagagaagcatcaaggcaacaccaatcctcgccaagattacagttccagcctaactccagtgccaggacagaggaatcgaaatgagaaaagaaaatgccgagtccgggaagacatctgttgcttcaattgtcaaggaatgggtcatttcgccgacaagtgcccaaaaccgagaaacatagctgccggcacgacagtccacgcaactccctgcaatcagaagcttgctcctcaacgaattgtcatccatgcatcccgaagcagtcctatagcccgcgttgcaacagctccaattccaatgaatgcactaccacaaggtgtcaatgctcaatttcagccccagccaccagctgacaagacagaggccagtatctgcgttgtacctttggaagttccaatacagcagctgagaaatcaagtacaagatgaagaacccgagtgtaagaaagttattgtttgttacaactgcagtgaagaagggcattactccgaaaactgtccccaaccaaggcaaaatcgacctccacattaccgccaatttacacgaagcagacattccaatcgtattgtggtcactggagcaaacgccgtacccgtaaggcctcgtgataatcagaacccatagcagaaacaatgcaccaatgctcctcctgctgcacctgactcggcaataaatcatagcaaccattctctgcatcgacagcctcagcaaagaattgtcgtagatggaagaagttgtgtctctccccgacctactccaggccgagccaagggcaatcaacctccggagggcgatacccagcagaagaccgtcatccgcttcaaccagcaatcagaaggaagcttctcctgtgaatgatagcattatgcagtcctatcacatcatcacagaaccaatcaaggatgcagtcactagaacaatgccagctatatctctccggaatcaaaatgagcagccatgtttgtggttttcagttcgctacttatcatggtgtaatcgaaagtttgcagcaataatgcaatacataaatatattcatgtctataaacagtgagcttgctatgcttatggatgattcatgttgaggatacaatgtaccgatgttaagcaccgtccctttttgtttaaggcagtgcctcgtattcatgtaatgagggagaaatgtgtaatacagacaagttccatgaggattcttttggaagatgcgaatatgtgattatgtgtataattgcttactgataaaggagacctagggtctcatttcaaaggaactatgttctaacctcgagttaataaccaacctgttgatggaaaagaaaaccaattaaactgtgttgggttaaaaagccaatgagacagtagttggggaacaggagtttggatacgcctgttacagatcaagataaggattgttgaatgaaacccataagtgtacccgccatgcctctacattgataagttcggatatacctgcaaacagttaagaagatccaggagacatcaatattctagaacataatagtcgatggttggtaattagtcgatcaggtatcagaaaagggtcaaaggtgatatggcagaagaacaatatggatgctccccatctcgaggaagcactaaaccctagtggcatagatacagatagcaagcaatgtatttccctgaaggtagtcagtgcagctttttgacgaaccacatcaaggtttcactgaaaggcagcaagccaaaggacctcatcgtccccagaagcgtccgcaatccacattaaagaataccacctgttagagataagccgaaagatgattgataaaaagagattggcaaagatgttctctagcatgaaagaagtaggccgaaaggtgattgataaacagaaacatgctctgcatcgctcaaggaagacccctgattgtaattgccccgcaacagtcaccttgtcattaagtcagcaagatgacctaggtaaaagtgtttctatgaaggcaaagagtgaaatcttccactcggtatcagatgctacacggagtgaaaaatgcaagcaccggttaccaggcgacgccacgtcctgggagatgatccaacgggaaagaactcatcaaggttaaaggtgtaaaggaatacgttgagtgctaactgatgacaacatgaagagaatagcggaaagtaaactgaacataaagaaagtgaatctgagttgcttgttcgtgggagctattcccagttatgaaccaagtgatatgttcgaagatagtctgcagaggtcagtttaaaatcacatgtaacagcgaagcctcagatttggcaggataatgattagacaataacaaatccagcaataaagccattggagaagacgtcgaagtatgtcaagtgggataaattggttctcttgggaagcataacttatagttagagtggttgacccttgcatcgaatagccgaagtacctagcaccggagaccaggaaagctaatatgagacagttgatggcaagttagaagtgaataacaagcatgatattcttatgatgacaaacatagtatcctagtaatgacaagctagtgttgacgcatgacatgaagttgataacttgtccgaggttgactccgaagatatgaatcatgagaagttctggaacggaagcatcactgaactaccgcaacctagtctgagtcagccaaaaggtgcaccctggtccaagtcaggtgaagagaagattccatccgcaacaggaggtcaagccaagcagttccgagtggtaaagttttgctggaagttcgtcaagacgcaacggaagaagtcagacaagaagagaagaccgcccaacctatcctcttgctagcctcctcgaatctcggggacgagattcttgtaaggggggtggatttgtcacgtcctgataaattcatcccaaaataaaaatcatcttctaaaaggaataatagaattaattaaaattcgaaaagaaattggcaaacattaaaatacgtacaagaaaaattcaaatgtgacccggagaatttttgttaaattctccttggtctaaaaggagccctcaaattttagtggaattttcagagcacaaataataattgaaaagaaataaacaaagtgaaaaggttttataaaaagaaaatcctaaaagaagtctgtttcccccctttttttccctcttgggccggctcggcccattccctccctctccctctctctctctctcctcccccgcggcccatcggcctcccccgtgcgcgcgccgctgacaggcgggcccgcccgccgctctcgctgacgggtggggcccacctgtcatccccaaccccgcgccgcgcccgccgccgcgtccgtgccctagcgccgccgccgccgcgaatcccgccgctcccgtccaccccgcgtgcaatcaagaggggggaattaatccccgcgttcccctcccccgtttccccctctttcccctctctctctccctcggattcgttcgaatcaagcccgtaatcatcgccggcgcaatcaatggcggccgaaatctccgcggccggtttccttcctccccggccgccttctctcccttccgacgctataaaaacgttgcccgagctccgctctttcgtttccgccgctcgccgctcactctcgccgtcgaaatcgtgctcgcgccgtgctcctccctctccgccatcgccgccgagctccgttccgccgccgccgccgctccggacttcctccttactcggcgacccctccgtccgcttcgccgcgacgccgtcgatcccgtccgccgctccgcttcgcccgtcgaccgccggagcaccgtcgtcatcgtcatcccgagccgcgccgccgtcttcctccgctccgtccgccgtttccaccgccttcgccgtcttggggtgagccgtggaccgctccgttcgtttcccccttccctcctctctcttgggtgccgctccgccgcgccgttggtcgccggcgggcaattcgggggcgcgggcgcgctcctcccgtcggccgcgcggcgaggccgccctcgggcgcgccctcgcggctgccaagtgggcccggccgtcagccgcccgcgcccgcgggtgcggtgacgcgcgggacccacggcgccgaccgccgccagccgcgtgcgcccggtccaccgtggaccgagcggtgacgcgtgggccccacttcccgtggacccggtccgcgcgcccgcccctcgctgacgcaataatccgatttttttaattgaaaattaaatgaagaaattcgcaaatatccatttaaagagcatataaacttcaaatggccatatcttggccgtttgaactcggaattggaccgttcaagtctctaatttttccttaagaagtaaagaacccatttttgtgctttgtttatgctgttatttggagtttattagagtaaaagccttttcttttccgtcggtcgtgtagacgctgcagcttcggaagatccgctcttcgtggaagttgaagccggtgtttgggaaagcgagcaaggcaagtcacatcatccttgagcatattgaatcccagtttgtaaaattatgttgatttaaattattgcattatcgctttatttaaattcccgcgttatcactgttttatttagccatgcctatttacctttgttacgaccatattattattgttattgttattattattaccttgttcaccctagattaaacaaaaccccatctagtggacactctatttatggttccactagtttaaatttaggtagatgcttcgcaatttaattaggcaacattaggtggttttataattttagactttgggagttctcatatcttttggacaccatggaatggttggattatggtggaattggacatacacctctctttctctttcaaaacccctaaaacctgttttcggtggggtttgggtgcatgccagttatgggaagtagcaccccggccactataaggattaagctcgggcctctgttgcaaagcactaccgtacttccacatgtctaatgggtaaggcttagtttgtggctcagtctagtcataaacaaaagtacacggattggagatggatgaagtcgggcgtcgatggacattctccagggcaaatgaaggctacacgagctgcggcccggtagtcgagatgtcatacggcggagggttggtgcccaatgctaggggctcagttctgcctgcctgtcccgggtatcccggccgtaggtaggattgggtcggtactcttgtctaaggctaggatgggttggaaactatgtcacgtcttccgtccgtataccgtggtggtatgtggcacgtggcaacacgtgaggaagatgtgtcttgtgggtaaagatgtacacctctgatcagagtaaatctattcgaatagccgagccctcggatatgggcaagccgagcaatgtacccaagtcagtgttctaattcttaaaatttgctcaacactaaaatgtggaatggttggcctgggttggcttgggacgagctggaacccaggtcgggttgccagttcggtccaaatcatcgtaggccttgggttaaggcaggttcgtgagggttcacggccttgtttaataatactgtgtagctctaggatcgtctttacaaaatggctttgggcaactaagtgacttttaaatgctgtttactgcaaaacttaatccctatattattattcccttgtacctcccttgcattaattatgcatctccggtgtggcttgctgagtactgtggttgtactcattcttgctcaatccttcccctcttcagtaagagaagctttggagaagatgtcttaggtggagtcctggcttataccccagttgagcgcctgtgaagatggagccgtaggcccgctagtccgctgctgtttatttttgattgtcaggcctggagcgcctttgtaataatgtaaatactatcgatgtaataaagatgtgtcttttatatcatgtttgtgtggtgtaccccggcttttcctgggacggggattaatacactagcgttcgggaaaaggcaattttcccggtcgcgacaaaaaccaaatttttgccactttgattttgcaaaagcaatctctctctccttctgtttatgagctaatctgaaacaaaaaccaacaatgtgtccatctttgccacaaaaagaacaagtatatttttcacgatgattagacacattggtagcattagaagatttagcagcacaagcaacaacaagagattttgcatgcacaacattggattttgaagaagatgcactcatagtagacatgataccagcagatttaaacacagttttgttagtatcaggtttaaccaaaatctcaccccttctagtaccaacacctaacacaacaggaggatgtctaaaattatgagtataaggattaaaacctaaatcacggttatgtgtgctaacctttgattgatccaaaatcatgttgaggttttttttaccatcagaaaatcttagcaaagaattttttaaataagaaacctctttttccaaattagcacaattttcacaatctaccatgacacctttgcttttacgacatttagggcaagaaagcacttcattgtttttcacaacatcttctatgtactcaacacgacctaaagcatctttcaatttcaacttattcaaagcacatgttgagcaatccaaaacatcatgaggttgttttaactttttagcagaaatcatgttaaacatcaaactagcatgaaaagcaatttgatatttttgcaacaactttttagttaaaaacaactcatccaaagtgcctgtgtgcaaggcaaaactacaagcaagagaagatctatttttcaaattatgtgcagcattaacatctctaatttttgaaatctcattcattaaaacctcacaatttgagcaatcatcatcattaggaataagagattttaatctagcaatttcagatttaagagattcaataataaattccttttttctatacatcttctcacacttctaatttttttcactcaaaatattaatagcttcctcaaaagcacttacctcattatcttcatactctgtgtcagattcaccacgcgccatgaagcaaacatcggagatgttctttcccttatcatcatctccactttcaccatctacatcacttagtggcttgaaggcggtgcaaacttgttgaaaagccttcctgagattctctatcttcctcccttgggatgaactcttcggcttgttgttgttggtcttctcaccatctttgtcttctcttttgcctctcccaagcttaggacaatgcgaacgaagatgatcaattgaaccacgcattcaaagcaacgatttggaccacctcttttcatgttcctggcattattcatagctcgagaaattctgttagcaaccaaagccaaatcctcctcctcgatctgttcgagttgatcatcggatgtggcattaaaaacagcaagaaaataaggcttatatgaagaagcatgaacatccgaagaagaagaaaaagaaaccaaagcacttgacttagaatcaactttccgagaaagaacattcatctcatgtgttttcaattttgtataaagtgaatccaaagtcatccaaagcttctccaggtttcatctcaaatttaatgtactcctttttgaaaaatatcacgacgaagttctttaatgttattcgttccttgatgaaagttactcaaagcattccaaatttcatgagcagctcaaaaatgcgcaacacgatcataatccgaacgagaaataccactcaaaagaatgttgtgagctttgcaattttgttcaaaagcagttttttcagcagcagtattaatagcttcaggaatcacatagggacgagaaacttttctccaaatatcataaacatgaggcttagttgaaaacctagcaggagtagccatggcaaaaactctagatcgataaaaatccaaagaagaaaacaaggctctgataccacttgtaggatcgaatcacaataactaagccaaccagagggggggtgaatggttggtatacccaaaaaccataaacttttagcggaaataaaagttaccctcgaaatcgacggagatcggtttgaccgagattgatctgctggtctgaccgaagcgtagccgccggtctgaccggtgttgaatctccggtccgaccgccgcttgccgccggtatatcgccggttagaccgtcgaaacccggtgaaacacaaatcgaagaactcttaaagtagatgatgactttattgattctctctgtgtttgcaaagtgcaccaacagcactgtagcgcccgttccgtcgtggcgcttagcgggaaaactatctcttaaaaaccctatttgcgaaatccgtttctttgcttgttgtctagtgtccgtgccatctcagatctcaaatccccgatctatcgtcgagttcaatcccgaatccaaatccttcccaaatcaaatccctccgcaaaagtctattttgcctccctcgggttcgatgggccaaactcctctcggcccatctcctactccctccccggctctctctctctctctctctccctctcccccgctctgcccgtgcgctgcgcacgcgtgcgcatgagccgcgccgagccgagcgtcctccgccctcgctgccgcttctcgccgcgccgcccgttgcttcccgcgcgcgcgcgccatggtggccgaccgcctggtcgccgccgccgtcagcgcctgcccgcgccagccgcccgtgtcgtcgctccgctccaaaccgccccgccgtcatcgccgtcgtcatcgactcggccccgcctctccccgcgctagcctccaagggacggaggcagagctcctcctccctctgccgcgtcgccccatcccctcctccttttcccaaagtggcaaggggcaagccccctttctcccttcctttttccttttcccctccccgccggcgtcatccgcctctgtcgccgttttggccgcgagcgccgagcgccagctagcgccttgaccgcccaaggtcggtttccaaaccgacatcgtcgtcctataaaccaaggcgccctcccatccattcctcctcccgtttcgctcgccgccaccgcgccattgccgcccctctgtctcacctccgccgttcatcgccaagcaccgggagagccagtgcgttcgtggacgcggaaggggactccgggcgctcgccttcttcctcttccccggcccgaggccggagagatcactcccgtgccgtcggcctctcgtcacagcgccccgcctcatctcggtagtgcatctccccgttctccctcctcaatccatctcttccccttagttttcggtagtagcatgtgtagcccccccgtagctagacagcgccgccccgactgctgccgtcgctcgccgtgtgctcgccgccgttgccgcccgagctcggaagcgcctctcatcgccggcctccctcgatgcgattcctcctaatccggcgcaaggggtggattcccgtagccgcgtagatgctctcaccgccgggaatcggcccctcgtgaccttgtcgctgtttcccccttttctctccgccggttgccgccgccgtaatccgccgccgtcgaacatcccggtgtgctcgccttcgcctgtatcaccatggtttgctccgccgcttgccgctgtcgaccgccgtccgttccagccggcgtcgtcgtcttcctcccgccggcccgcgtggcagccacgtaggcgccacgtcggcgccacctcagccgcgaccgggtcaagtagaccccggtccgccgcttccctccgccccctcgcgggcgtggtccatcgcgagccgtgaggctccgcgtgggcccgccgcaccgcgtcctccgcgaaccgcgcgcatgcgccgcgcctccctccctaaaccctagcacgccccgcgtgcacctcgctcacggtgagccgagtcgccgacaagcgggtccaaccggggaccacgcgggatggacccggcccaccggctctctctctcccctccgcacccgagccgccccattctctcgggccgcgccctcaaatctcgagatctatctaatggcacgcttagaggtcaataataaggctttattttcgccgtttgctgagttgtcccgtttcgcgtgtagtttcggagcccgaagacccgcagtgcgaggatttcgaggatcaagctcaagatctcgagcgaggcaagccacctttgaacatcttgagcctatatttgaacttaattatattgtgtggatattatgggtaccccatacccatacggcatggttatccgactagtcataggggataacttatatctatggaatatgtaatagatcatgactcgggtattacgtttccttatatattacggaacagtctaaagtcctggtttgataatattgtaaagtagatttaggaaaccgataccgtattggttaaggtttctatcttgtaatcctgccccccaccctatataaggtgggcgggaggccctctagagggcatgacacaacctgatcgtcagatcaatacacactcggcggattcaaatccccaaacaggagtagggtattacctctcattgagagggcctgaacctgtctaaatcctttgtctctgcatccatccactttaggtctcgtacgctacccccttttattattgccgaattcatgtttcgacagttggcgcgccaggtaggggtaaacgccgagtttcctgacgacgagtgcgatggaatcaactttatgagtcgccggcttcgtcttcgctttgggagctccttgattcctcgccgccgacgacttcaacaagacgaatcgtcgctgctattctctgcctgatcttgttcgcatcagcacgacggcaacgacggggcaacgacagttcgacggatttgatggtcgtcctcgtccaccaccaagcctactggtccaatctacccaatgaggatgccatggtgttgcaagatggatctacaaacacgaagcatgccaaaaccaatctaatcggatgcataggagacggctgcagccacgccgatgccttcctgccgtccagcgtcgtgctgatggacaccaacgccgctcgcgactgcgacctccgcctcctccgctccgtttcggagtcagtcgaagagatcaatctcggcgagttttttccttttaatttccgacttcgccgggttttttccttttcaacttattgttgtttattagattgatctctaaatgtcagattaatctctcttggtattttctgctgtttgcatgtaacgccgcggcactactcttgccgactggtgtttccgtctgcatggctggcctattatgccgccgctgttgggcgtctacgacttcaccgccggcctgcctccgtcgccgccgagtggtgcctccgcctacacggctggcctattatgccgccgctgttgggcgtctacgacttcaccgccggcctgcctccgtcgccgccgattggtgcctccgcctacacggctggcctattatgccgccgctgttgggcgtctacgacttcaccaccggcctgcctccatcgccgccgactggtgcctccgcctacacggtcggttggtcacaccaccgttgatgggcatcgtcatcttcaccgccggcctgcctccgtcgccgccgattggtgcctccacctacacggctggcctattatgccgccgctgttgggcgtctacgacttcaccgccggcctgcctccgttgccgccgagtggtgcctccgtctgcatggctggcctattaagccgccgctgttgggcgtctacgacttcaccaccggcctgcctccgtcgccgccgactggtgtccccgcctatacggtcggttggtcacaccaccgttgatgggcatcgtcatcttcaccgccggcctgccttcgtcgccgccgactggtgtcttcattgttattgatggacgactttgttcccacattggccacttctgccatcaccaaggggaatattacaaagctaagtcatcatttattttattctttatatgatatttttccttttcctctgcctcactacaccaattggtcttgcattgagtagtgagtcgggggctacagatgttatatcatattttttataatatttatcttgattgcttgcgacataatctgagtacaaaagtacctatcgagttatggagttctatcttcctctgctttccgtttggtttgccaatggatggttgcctttgggccgattcctagcacccgggggctcgttggatggaccgagtaacgcaaggtgctaagtattattcggaataaatcaaaagcatagagatgagataaatttattttctgctcttaataattgcaaaagtacccgagtagtaaattctgatccgtgaaactttattccattaatgacgaactcatgtcactcatatgcatgtttgggaagtgcctaggccgactcccggtgcttgatggttatgactagtcggacagagtgtttaaacgtacagagtcatctgctcggagaaatcaaaattgacaagaggagaaatacatatttataaatattttaaaatacttgattttttctcgagtattatatttatatcagatactactcatcctatatgtttgttctgcaggatccagatccagatatgcataaaaaggattgatggctttaagcttatctcttacgctccaggaatggatcagtcagaacatcaccaccggctcgcctcggccgccgccgactggtgtttccgcctgcacggctggcctattatgccgccgttgttgggcgcctacgtcttcaccgaccggcttgccttcgccgccgccgactggtgtttccgcctgcacggctggcctattaggccgccgttgttgggcgcctacgtcttcaccgaccggcttgccttcgccgccgccgactggtgtttccgcctgcacggctggcctattatgccgccgttgttgggtgtctacgtcttcaccgaccggcttgccttcgccgccgccgactggtgtttctgcctgcacggctggcctattatgctgccgttgttgggcgtctacgactccaccaccggcctgcctccgtcgccgccgactggtgtcctcgcctaaacggttggttggtcacaccaccgttcatgggcatccacgtcttcaccgaccggccacctcgtccgccgccgactggtgtttccgcctgcacggctggcctattatgccaccgttgttgggcgtctacgtcttcaccgaccggccgcctcgtccgccgccgactggtgtttccgcctgcacggctggcctattatgccgccgttgttgggcgtatacgtcttcaccgaccggccgcctcgtccgccgccgactggtgtttccgcctgctcgctggcctattatgccgccgttgttgggcgtctacgtcttcaccgaccggcttgccttcgccgctgccgactggtgtttccgcctgcacggctggcctattatgccgccgttgttgggtgtctacgtcttcaccgaccggcttgccttcgccgccgccgactggtgtttccgcctgcacggctggcctattatgccgccgttgttgggcgtctacgactccaccaccgacctgcctccgtcgccgccgactggtgtcctcgcctaaacggttggttggtcacaccaccgttcatgggcatccacgtcttcaccgaccggccacctcgtccgccgccgactggtgtttccgcctgctcgctggcctattatgccgccgttgttgggcgtctacgtcttccccgaccggcttgccttcgccgctgccgactggtgtttccgcctgcacggctggcctttatgccgccgttgttgggcgtctacgtcttcaccgaccggccgcctcgaccgccgccgactggtgtttccgcctgcacggctggcctattatgctgccgttgttgggcgtctacgtcttcaccgaccggccgccgcatccgccgctgctggtgtcaccgcttgcacggctggcctgttataacgccaactgatgctatcttcttcacggctggctacatcgctgtcactactaataggcatcagtatcttcaacacaagctgcctacgtttgccatggctgccgactgttttcttcacttccatggctgcatgattctgccagtgttgattggccttaccatcttcatcgccggtcgtctcgtctgctgctgactagtgccctcgcttctacatctggtttatacagctatcactactgatgaacatcatcgtcttccgtcgccgactggttatgttgtcgccgactagtgcttttattttcacaactgcgcgtcttcactaccagtttgcttctgttgccgacgactcgtgttcacttcatcacggcaatgcaactttgtcatcatggtagagcgacttcatctttattatcttcggcactggcaaactctattgctgctacttcgcaagttttgctacttcaccaaccacgacgtctttgtgagcctcgacatctcggcatgcgatgccatgttattttactacaacaagaggctctccaatattcaggatttctacttggacatcttcaacacatatcttcaatcaagcaataactattcgacgacaagaggctacagttctcgactctatgttcagttgtttcccaactaatcaaagagtcgggggctacacaaatacaaggctcaaaatttgacaaattttatgtcaagctgaagaaatcaattcatcaacccacgagtcaactccaggagtcattatcttcatctttgcttcggagcagacattctacttcaacaacatcaactctcctccaagtgaagcatctacaacagctataacattaatttgatggattattgtcactgacatcatcaccagcacctctgcttcatcgaccctgacatctctgctgttgctaatggatgattatgttttcgccgacttattatttcaccttcacggttgacctactatgcaaatgctgatgagcgtctttgtcattatcattggttgccacactgctattggctggatcaccgacatcgtcatcttcatcatgtcggttgcgtttgttgtcgtcaactacacaactttatcgctgagcgccttcatattcattgctggctgacctgactgccgccgactggtttcttcgcctccatggctatgtgacttcagtacttttgattggtatcactatcttcactaccaccaatatttttgccacctctggtgggcaatattctctctatattggttgtcttgtctctatgccaactgcgtcagctaccatcaatgaacaattgtgactacgtgttcaggggcttactagctcaaatacaagtattatatcttcaatttggacttgctccggatacatgcaacatgaattcatgatcatgggtctattttatatgctcaaagactggactatttattattccccgtaagggttatcaactgaatacttgcgccagtcgggattcaattgttacatctattttggagtatcccataagggataaccactcagatcagaagctattcatatgagctacgcttggtctatattacccggaagatttattactcgggagcatgtcacatgcgtcatcctttaaagggtgtcgaaggcatattttttggcctaggcctaatatgtctgcagcccatattttcaggtgtggcctgtcacgttcttttagggacttaggcactttttgcttaggccaaagtgcgcgtgatcaagtgcccaataccttaaaatccttttataccgcagttacttaactttttaggagttggtacaatgcatcttaaaaggtgtcaaacagtaaagctttatatagctgtctcgctgacttttttatatataagtcaaggtgctgtttgggtttttaagcaattgattagatacaatatcattgcttttcgccacgtaagtgtgtatttttattgaccaatattatggcttaggctgattatatattgtggtcattttctaggcggttggtaaatcctttatgagtttatttactcggattttacaccacatatgccatatatttccaggtgtggtgaaaccatgtgtcttctagggacttaagcacatctgttaaagcagtgtgcgcatggcgtatgcccaatactttggaaatttctttattcacaatatacaagcttctttatagctattttgttatatcactcatcatattttacaaagcagttggtatatcactcggatcatgttatttggaggattcacaccgcatatgctatatattgatatcaagtcacttggttgattacgattatcaaaaccactcggttggttggattatttattccttgactatatgcttggtttgttcaattaaccacattgtcgggggctacacctattaggtgcatctagtcggtgcacctgactttattttccagccctccacagtcttcagatttggtaaaagtactcgggagaccatgacaaagatgattgaagcactcggctttggagtaatctggttcgagagaagattatcttttcgactgcgaaggtctcaggggctactgtggatattatgggtaccccatacccatacggcatggttatccgactagtcataggggataacttatatctatggaatatgtaatagatcatgactcgggtattacgtttccttatatattacggaacagcctaaagtcctggtttgataatattgtaaagtagatttaggaaaccgataccgtattggttaaggtttctatcttgtaatcctgccccccaccctatataaggtgggcgggaggccctctagggggcatgacacaacctgatcgtcagatcaatacacactcggcggattcaaatccccaaacaggagtagggtattacctctcattgagagggcctgaacctgtctaaatcctttgtctctgcatccatccactttaggtctcgtacgctacccccttttattattgccgaattcatgtttcgacatattgcttgaaaaatattatgcattgataggatcgcacttaatctgcttgtcccgtctgcaaggcagattggcggacctacctaatttgttgcatttgacccttccattgtaattattataccatgttcccttgtatccacctagttgcgcctcggtaatcgtgcactcggcacgggtatcgacggtcgctgtcacgcccggaatttctatccaaaattccaaacgcttacatgtgtgtgaaccctcgtccaggaatcagccgaggcacacaataacaaattgataatagagtacaaatattactctaattaataagcgaataaaatgtcattacagaggtagatagttcctctcaatcaataaagttctaagcagcggaaaataaataaacggcgcagacggctccactccacaggcagcttgaccaaggctacacctaatcctccacaccatcagcctcattgaagaactcttcctttgatgaatgattgcaaggtgagtatatgacatactcagcaagccacgcagcaaatatgcaagtgcacaggataacaaaggatggcataatagggttccatttgcaaaagcagcatttagcaaacatttgagaatttaacaaaacagttaagtaataattaagcaatattaaaccaacgctatacaacataccctgttgtataggcccaaccattctgaacaaccaccccggctgcacagttctatctccaaaccaggaatgtaccattccaaaccaggagctaatcaaattattaccagtttaagcatcttttacaatgatgagaggtgtgagactaatcacgaaagacattgttagacccgcccataaccgcgggcacggctaatcgaatagttttactctgatcagaggtgtaccactgtacccacaagacacaaccccacatcatgtcaccatgtgcctcaataccaccacggtatctcggaaaggagttgtgacaatacccctcgcataacacaatccactgcagcgcaccttcctggatcataatcacccccttataaaacaaggcatggactccccagcgacccccgtgggcttatctccgccacttctcagtctggtgccccgcaatgaaccatgctatacaaaagataaagccgttgcccatgctggcttgtggttggcacgataaatgtttcacaaccgaaactcgtgaaccggtccttaattgccatgagcacgaccttcaaatccatgtgctcacaacccaccattaccaggttttagttggcacattaattaattaactaatcacgattgaccaccgtgaactatcaataagccatcatgaaataatagtgagtcattagttatcccataagtgtactaatgtttctaagcagggctaagcaattatatctaatatctagttgaaccaatataaataaagctcaactagtcaaattataataacccaaggtatcaaggaataaggtaatcaagaacaaaagggccataacaatcaataggttaattccacccaatgacattcgaaaatagatgcaatagttgaatagaaacaatagctttaaataggatcaacatgctcaaagggttgtttgggatctgtgtgacttgccttgctggccttggaactcttcaaactcttcttccgcgaaaacggactctccggaaacgacggaatctaagcaaaaagaagcaaaatcaccaaaacagcacataaacaagcatgaacagtacatgtggatatttttaatgtgtagatctcaattttagaaaaatttagagacttgaaccaactaaatcggagctaagatgaattagttatgaatttttaaagattaaaccggattaaaacacttaaatcggtttaaaattgaattatgacgcaataatgaattatttttgaaaaggaaaaggggatttattgcgtcagcggctagggtttgggtggaccgggcgcatgggcggcggttcacgcgaacggacggccgagattgatccgatccaaatcggacggccgagattgatcgggtccacggcggttcacggcggacggccttgatgacgccagcaatgacgtcaccgacggcggcggcggctcggcgaggcagacgactcgagcggcgcacgctcaccggcgaacggcggcgctacggcacgaacggaggacaccaacgggtagcggacggcacggcgaactcaccgacgaccaaagcgacggcggacgaccaacggacggcgacggcgacgaggttgaaacggcggcggtcttcggcttgacgacggcgacgatgctccggcggtctccgacggcagcgaaagagcggacgaggacggcgacgacttggcgacgacgacggcgaacttcccgagcgacggcgacggctggaacgacggcggcgcacggctggagcggcggcggcgaaggcaaagctagggcacacggcgctagggctactccggcgacgagaggcgaaggcgagggtggcggcgagaagagaagagcacggggatccttttaaaggggctcggaggcggcggcggaggcccacggcgacggcaacggcgaaggaaactcgcggcttggagagaggaaagccgatccgattcgaactcgaatccatcgatttccaaaccgatttagccgaagtttccaaaggagaaaaggtagaggagatcccgaagatcatttcccctctatcaattcagccggaaacggaaaggagcggccggattggaaagcggcggcgacggcagctcggcggcgcgaaactagggtttcggcccgaggaggacgacgggcctgacaggtgggacccacctgtcagcggctgcgaggggcgcgcgcgcgcgcgggcggctgcggactgggccggctgggccgaggagagagaagagaggttttgggccgactttcggcccaaagccaaaagagactttttaaaacctttttcaatttaaattatttcttaaatgcaattccatttattaaaaatacttccttagctcaaataaatcccagaaaaatctaggaattatagaattaagcaaagtatttaatgaaattttatctggcccaattttatattggaatttattaattaaacttagatcttctcttcaagacttttaaaattatttctagaaattccaattaaacaacaatttatatattttgaattttcagggtgtgacaaacctaccccccttaaacagaatctcgtcctcgagattcggaagaactggcgaacagaagcggatgagctgacttcaattcatcttctcgttcccaagttgattcttcttccgagtgattactccattggactttgcaaaaacggataactcgattcctggttcttctctcacttgtttccaggatacggattggtttctcaacataagtcaaatcctcttggacttctatctggtcaatattagctccttcggtaggtacccttaaacactttttcaattgcgacacatggaacacattatggactcctgccaaagattgaggtaactccaactgataagcgacctctcctcttctactgacaatcttataaggtcccacaaaacgcggtgccaattttcccttggtatgaaaacgatgaactcctcgaagaggcgtgacacgaagatacacataatctccctcttcaaaactcaaatctctgcggtgattgtcggcataactcttatgtcgagactgagccactcgcaatctttcttgaatgatctttaccttttcttctgcttcccttaggatatccgtcccaaaaacctgacgttctcccgtttgatcccacaaaagcggagtgcggcacttccgaccatacagtgcttcgtacggagccatctgtagactagcttgataactgttgttgtatgaaaattctgcatagggtagattcttatcccaacttccaccgaaatctagagcacaagctctcaacatgtcttccaaaatctgattcaccctttcggtttgtccgtctgtctgtggatgataagcagtactaaagttcagcttagaacccatctcttcctgaagtttcttccaaaaatttgaagtaaactgactgcctcgatcagacactatcttcttagggacgccatgcaaacacacaatccttgccatatacaattccgctaagcgacttcctgaataagttgtctttaccggaatgaaatgagccactttggtaagtctgtcgactatcacccaaatagagtcatggcctgatgacgttctgggtaaaccagtaataaaatccataccaatttcttcccatttccattcaggaatcttcaaaggttgcaacaaaccggcgggtttctgatgttctgccttgactcgctgacaaacatcacatactgctacatattctgcgatttcacgcttcatacttgcccaccaaaatctttccttaagatcctggtacatcttagtactaccagggtgaatggagtataaagtatcatgagcttctttcagaattgcatcctttaaatctttgttgtcggggacacagattctctcacccaaccatacagttccttgctcatcctccaagaaaccaatagcttttcctcttctcatattcttcttgatctcttgaatatcaggatcattaatttgggcttctctaacttgatcaattagagtgggcttcgcttctaaggctgcaacgaaacctctaccgacaattcccaaatttaatctttcaaattccttgcataattccaatggcaactgtcgtccttctgtagcattgcaatagccttttctgctaagagcgtctgctacaacattagcctttcccggatgataatgaattcccatgtcataatccttaattaattccaaccatctccgttgtctcatgttcagatccggctgagtaaagatatactttaaactcttgtgatcggtgtacacttctgtacgagtaccgaaaagataatgacgccaaatcttcaatgcatgaacgactgcagctaactcaatatcatgagtagggtagttcttctcatgcggacgtaactgtcgagaggcataggcaaccaccttcccatcttgcatcagaacacaacctaacccaagtatggatgcatcgcaatacacttggaaacccttttttggatcaggcaaagtcaaaataggagctgatactaagcgattcttcaactcttgaaaactctgctcacattcttccgaccacttgtacttcacatctttctgaagcagtcgtgtcatgggcttagcaatcttggaaaaattctctataaacctccgataatatccggcaaggcctaggaaactgcgaatctcttaaactgtctttggttgcttccaattggttacggattccacgttactaggatcgacggcaactcctccggctgagatgacgtgaccaaggaatttcacttcagacaaccaaaattcacacttgctaaacttagcatacagttgatgttctcgtagcttctccaatgcaaggcgaagatgttcctcatgctcttctttggttcgagagtagataagaatatcatcaataaagaccaccacgaacttgtctaggtattccataaacaccttattcatcaagttcatgaagaaagcaggggcattggtaagtccaaaagacataacagtacattcgaacaacccatacctagtggtaaaagctgtcttaggtatatcttcctctttgattctcaactgatgataccctgatcgaagatctatcttggagaaaacagtggcacctttaagttgatcaaacaaatcatcaatcctgggtagtggatacttattcttgatagtcacatcgtttagtgcacgatagtccacacacattctctgagtatggtctttcttttccacaaaaataaccggagctccccatggtgatgaactcggtctgatgtatcctttctgtagcaaatcatctacttgcctcttaacttctgccaactcattggctgccattcgataaggtctcttatggatcggagttgttcctggtaccaaatctattctgaactctatatcccttttaggcggcataccaggtaaatcatctgggaacacatcaggatactcccggactataggaatctcttccaaagttatctggttcagtcttgaccttaaagactcagatgacaatgcatgaacagttacaactcgaccatcatagctgttgagagttacttttctgttggcacagtctatcacacctttatgtctggctaaccagtccatccctaggatgacatcaaggtctttggattttaacaagataagattggccagaaatggtactccttgaatttctattctgacagaggggctacgttgcaaagagagtgcttgatcacttggggtactaaccatcaaaggacgtctaagatcttctacttccatcccatgatttcccgcaaaactcatagataagaatgaatgtgtagcaccagaatcgaaaagtactgttgcaggaactgagttaacaaggaacgtacccaaaatcacatctggagcatcttgagcttctgcagcagcgacatgatttacacgagccttggatgctggtacagcagagttattctgggcagggacaaccttcacgcgtcggggcttcggacacttgtcagcataatgtcctggatctccacagttgaaacacaccacgggcttgctgccttgctccctcttggcaggttgttgctgtgctggagctgcaacaggacgtggagcttgattacggatgttgttgccagcattgttgttgaagaactgacgttgcggacaaacaacagacgaagaacctccctgtggcatggactggggtcctaaagtaagacgcggcttctgattatttccctgttgtgtcttgaattgagcaatccgacgtttcttctgctccatgcgattgtacttgtcctcctgacgaatagccttatccactaatttctggaaatcagggtaatctccaaccatgagtgggtaagaaagctcatcattaagtcctcccaaaaacttctcctggcgctcttcatcattgcgcacatcttctggagcataacgagcaagacgattgaactcgtgcagatactccgtaacagagcgagatccctgagtaagcgacctgaactccttcttcttgagagacactactcccgatggtatatgcgtcttccggaaagcagcggtgaattcaagccaagtgataggttcagcagtagtcctgttaaggcggaagtgatcccaccattcagaggcagggccatgcaactgatgtgatgcaaatgaaaccttctcctgatcagtacactgaagtaaatccaacttcttctctatggcatgcagccaatcactagcttcaacaggattagtggtactagagaaaacaggcggcctcacacgaagaaattctgctaacttgttttggggaggtgcatgattattcccttggttttgctgattctgaaattgctgcatcatcatgttcataagctgtgtctgttgagcaagaacttgggccagagtaggattctctccattgttgttattggggttgttgggaccattcccattgctgcgagtgttcaccatctggcatggacagggcacaagaagagaaaacgggggaactacttaggactgagaattactttgacttttattgatcttaactgagtttcattattacaaactgaagactctcacaccactaaactcaccaacttcctaacactcaaaagcaaacaaacacatgcaattacatcccaccactgatgtaaatcacatgcaagacccacacacacacaagcaaacttaaaacaagcaaactaacacaacgatctaagacaacggcttaacaagtcactctagttcttccgagcataggaggtcgattgaaggctcgttcggctcatcttcctcatctttgatagctacccactcaaacttggaatggttgcgcttggattcttcttcttcatcactacttatgatgatgaccggaggatccgcttgagctggagcaacttctttctccaccacacgaacctttggcgccagttgatagcgagggacaaataaagctctcttccttgcggtaagacgaatcctggccttctgcggcggtgcttctcccttcaatgcggctaattccttttccaaacgatccaccttgtcttctaacttgcaaatcttaccacgattccgatcttcacgatcttgagctgctaacacagtctccgcacgactttcatccatagcccacaacatctcaaccaaatgtttcgtggtaacatcattctcaattccttcagtctcaaggtaactgccacggtcacttccctgaggttggcgaggatggtagcgatactcagtgtcggccaattgatcactgtagcgatcacggagctctcctatggcgatccttgccacctcctgacatgcatggatgtagtttcttcctccagcttcaaacattactgaggggacctcttcactattgctgttcaaggtgactttgactcggcacttctcttcatgacgatcatgaggaatctgggtataaaaaggggcagtcccgaatccaatgacaaaggacatcatacgcaactcctggacaaaaccctcaacaccaaacaggtactcaggcttgtaacgcggcatctaaagacaagtgaaaggagggagttaagacctttatccaattaatagcacaagtttttggattaatttgaataaagttagaaaatcagagtaaaaaggtaagtaaataaagtaaaccaagctttgtgaaataaattaaaacagttggaaacgaggtcacaaattttgtaattttgaataactggtttcaaaagaaagttataaaatcaacatactaaatttattttattgcagcaaaattaaataaaacagtattgtaaaacttttgctggtaaatgagccattagtacagtaatagatgtacagtactaataacactggaataaatttttgaatgagaaccattaaaagagattatgaagtgcatgtgccattagtttggtttaattaaaagagaaagggaggagaacagttctacttttccaatatttttcagagggcttctatgggtaaccatttggcataacctagggtcaaagatgctctgataccaacttgtcacgcccggaatttctatccaaaattccaaacgcttacatgtgtgtgaaccctcgtccaggaatcagccgaggcacacaataacaaattgataatagagtacaaatattactctaattaataagcgaataaaatgtcattacagaggtagatagttcctctcaatcaataaagttctaagcagcggaaaataaataaacggcgcagacggctccactccacaggcagcttgaccaaggctacacctaatcctccacaccatcagcctcattgaagaactcttcctctgatgaatgattgcaaggtgagtatatgacatactcagcaagccacgcagcaaatatgcaagtgcacaggataacaaaggatggcataatagggttccatttgcaaaagcagcatttagcaaacatttgagaatttaacaaaacagttaagtaataattaagcaatattaaaccaacgctatacaacataccctgttgtataggcccaaccattctgaacaaccaccccggctgcacagttctatctccaaaccaggaatgtaccattccaaaccaggagctaatcaaattattaccagtttaagcatcttttacaatgatgagaggtgtgagactaatcacgaaagacattgttagacccgcccataaccgcgggcacggctattcgaatagttttactctgatcagaggtgtaccactgtacccacaagacacaaccccacatcatgtcaccatgtgcctcaataccaccacggtatctcggaaaggagttgtgacaatacccttcgcataacacaatccactgcagcgcaccttcctggatcataatcacccccttataaaacaaggcatggactccccagcgacccccgtgggcttatctccgccacttctcagtctggtgccccgcaatgaaccatgctatacaaaagataaagccgttgcccatgctggcttgtggttggcacgataaatgtttcacaaccgaaactcgtgaaccggtccttaattgccatgagcacgaccttcaaatccatgtgctcacaacccaccattaccaggttttagttggcacattaattaattaactaatcacgattgaccaccgtgaactatcaataagccatcatgaaataatagtgagtcattagttatcccataagtgtactaatgtttctaagcagggctaagcaattatatctaatatctagttgaaccaatataaataaagctcaactagtcaaattataataacccaaggtatcaaggaataaggtaatcaagaacaaaagggccataacaatcaataggttaattccacccaatgacattcgaaaatagatgcaatagttgaatagaaacaatagctttaaataggatcaacatgctcaaagggttgtttgggatctgtgtgacttgccttgttggccttggaactcttcaaactcttcttccgcgaaaacggactctctggaaacgacggaatctaagcaaaaagaagcaaaatcaccaaaacagcacataaacaagcatgaacagtttgtggatatttttaatgtgtagatctcaattttagaaaaatttagagacttgaaccaactaaatcggagctaagatgaattagttatgaatttttaaagattaaaccggattaaaacacttaaatcggtttaaaattgaattatgacgcaataatgaattatttttgaaaaggaaaaggggatttattgcgtcagcggctagggtttgggtggaccgggcgcacgggcggcggttcacacgaacggacggccgagattgatccgatccaaatcggacggccgagatcgatcgggaccacggcggttcacggcggacggccttgatgacgccagcaatgatgtcaccgatggcggcggcggctcggcgaggcagacgactcgagcggcgcacgctcaccggcgaacggcggcgctacggcacgaacggaggacaccaacgggtagcggacggcacggcgaactcaccgacgaccaaagcgacggcggacgaccaacggacggcaacggcgacgaggttgaaacggcggcggtcttcggcttgacgacggcgacgatgctccggcggtctccgacggcagcgaaagagcggacgaggacggcgacgacttggcgacgacgacggcgaccttcccgagcgacggcgacggctggaacgacggcggcgcacggctggagcggcggcggcgaaggcaaagctagggcacacggcgctagggctactccggcgacgagaggcgaaggcgagggtggcggcgtgtcacgaccggaaaacacccaacaggcgttcctgacgtgcgtgcattattccttgtcccaggaggcaaggtacaccaaaagttgatacaattcagagtttaacaagcggaagcgtatataaaattattacacgggcagcggaggcccaacacacaaagacaaacgagaaacagcggaagactagggcgacgaccacaggcgcttgacggcaggcacgagctagacaccaaagccttcatcttccaggaactcctcatctgggcttggggaaaattgagcaagactgagtacaaccaccgtactcaacaagacacacccacaaatgcagaataaatgcaagggagtacaagggaattataccataaaggggttagggttgcagtaaacagcatttaaagacatttagttgctcaaggccattttgtaaacacgatcctagaactatccaatattattaatcaaggccgtgaacccacacgaacctgccttaacccaaggcctatgatgattcagaccgaactggcaacccgaccctgggtcccagctcgtcctaagccaacccaggccaaccattccatattttagttgttaagcaggttttaagaattaaaacactaacttgggtacattgctcggcttgcccataaccgagggctcggctattcgaatagattatactctgatcagaggtgtacatctttacccacaagacacatcttcctcacgtgtaaccacgtgccacataccaccacggtatacagacgaaagacgtgacatagtttccaacccatcctagccttagacaagagtaccgacccaatcctgcctacggccggaacccccgggacaggcaggcaggactgagcccctagcagcagggcaccaaccctctgccatatgacatctcgactaccgggccgcagctcgtgtagccttcatttgccctggagaatgtccatcgacccccgacttcatccatctccaatccgtgtacttttgtttatgactagactgagccacaaactaagccttacccactagacatgtggaagtacggtagtgctttgcaacagaggcccgaagaccggtccttaaacggccgaggtgctactatcaaaaccatgcaccccgagcccagcctaaaaccaatttaggggattttgaatagagggggcggtgtgaagccaattccacaataaaccaacaattccagagtatccaggtgatatgaatatttcccaaagtctatagttgtaaaaccacctaaggttacctaattagattgcgaagcatctacctaaaattgtactagggataccatgagtagagtgtccactagttgaggttttgtttgtctagggtgaacaaggtagtaataataacaataacaataataatatggtcataacaaaggtaaataggcatggctaagtaaaacagtgataacgcgggaatttaaataaagcgataatgcaataatttaaatcaacataattttataaaatgggattcaatatgatcaagatgatgtgtcttgccttgctcgttttcccaatcgacggcttcgacttccacgaagagcggatcttccgaagctgcagcgtccacacgaccaacggaaaagaaaaaggctttaacactaaataactccacataacagcagaaacaaagcacaaaaatgggttctttacatcttaaggaaaaattagagacttgaacggtccaattccgagttcaaatggccaagatatggccatttgaagtttatatgctctttaaatggatatttgcgaatttcttcatttaaattttaattaaaaatcccatttattgcgtcagccgagggaggggacgcgcggaccgggtccatgggggtgggggcccacgcgtcagccgctcggtccacggtggaccgggcgcacgcggctggcggcggtcggcgccgtgggtcccgcgcgtcagccgcacccgcgggcgcgggcggctggcggccgggcccacttggcagccgcgagggcgcgcccgaaggcggcctcgccggcccggtcgaagggagcggcgcgcccgcgccccgatggtcaccgccggcgaccaccggcgcggcggagcggcgcccgagagagaggagggaagggggaaggcgaacggcggtcttcggctcaccccgggacaacgacgacgacgagaacggcggccggagcggaggaagacggcggcgcggctcgcgatgacgatggcgacggcgctccgacggtcggcggacggagcggagcggcggacggggtcggcggcaacacggcgaagcggacggaggtgtcgccgagtaaggaggaagtccggagcgacggcggcggcggaacggagctcggcggcgacggcggagagagcggagcacggcgcgagcacgaatccgacggcgagagcgagcggcgagcggcggaaacggaagagcggagctcggggagcaattatatagcaccgagagggggagaacgcggccggagaggaaggaaacgggcgcggggatttcggccgccatagatgcgccggcgatgaatgcgggaaggaaatcggacgaatccgagggagagagagaggggaaaacgggggaaacgggagagggaatcacggggagtgattcccctctctttaatgcgcgcggggacggcgggatgcggcgcaatccgcggcggcggcggcgctagggcacgggcgcggcggcgggcgcggcgggaggaaggcgatgacaggtgggtcccacccgtcagcgagagtggcgggcgggcccgcctgtcagcggcgcgcgcgcgcgcggggaggccgatgggccgcgggggaggagagagagagagggagggagaagtgggccgagccggcccaagagggaggggggggggggaaaaagaacttcttttaggattttctttttttttaaaccttttcaactttgtttatttcttttcaattattatttgtcctctgaaaattccactaaaatttgtttaagcattttaggcttttaggaaatatacaaaaatcctccaagcctcatttgacttttatctttgcacattttaattgttggaggctttcacatggaattttaattattctttgcacaatttcgaggatagattttagagtcgatttgggacgcgacaaacctaccccccttaaacggaatctcgaccccgagattcggaagaactggcgaagagatcgggatgggctgccttcagctcgtcttcgcgctcccaagtagcttcttcttcggcgtggttgctccactggaccttgcaaaaacggattactcggttcctggtcctgcgctccatggtgtccaggattttcactggcctctccacataggtcaagtcttcgcgaacttcaatttgctctgagtcggcctgctcggatggcactcgaagacatttcttgagttgcgacacatggaacacatcatgcacgttgcccaaggaggcgggcaactccagctggtaagcaacttctccgcgtcgagcgatgatacggaagggacccacataccgaggtgcgagcttcccttttgtctgaaacctgtgcacacctcgcaatggcgtgacccgaagatacacaaagtcatccactgcgaattccagatcacggcgacggttatctgcataacttttctaccgagactgtgccacctttagattatcccgaatgattctgactttagcttcagcttctctcaggatatcagtcccgaacacttggctttctccaacttggtcccacaatagcggtgtccggcatttgcgcccgtacgacgcttcatatggtgccatttgtatgctggcttgatagctgttattgtaggagaactcggcataggggagactcttatcccaggtcttcccgaaatctagtacacatgcgcggagcatatcttctaggatctgatttagacgctcggtctgtccatctgtctgcgggtgataggcggtgctgaaattcaatcgagtacccagctcttcttggagcttcttccaaaagtgagaggtgaattggcttcccctatcagatacgattttcttgggaataccatggagactcacgatcctagcgaagtagagctccgctagtttgttccctccataagtggtcttcacaggaataaatcgagctacctttgttagtcgatccacaattacccatatagaatcatatccaccttgggtttttggaagtccggtgatgaaatccatcccaatttcatcccacttccattctggcacttggagaggttggagaagtccggccggtcgttggtgttctgccttgacacgctggcacacatcacatagagccacaaactctgcaatttcccgcttcatgctaacccaccagtatttctccttcaagtctaagtacatcttggtactgcccgggtgaatggaataaggactttcgtgagcttcctgaagtatcagctgtttaagttctctgttatcgggaacgcacacccgctttccgttccatagagttccgtgttcatcctctgtgaaaccagcggctttaccctgtttcatattcttgaggagtccatgcatgtcaggatcgttcctctgagcctcgcggatttgatcgagcaaggtaggcttggcttccaacgcagccaagaatccgcgaccaactatgcttaggttcagggcttccatctgttgattaagctcgggcggaatgctacggacgttaagagtattgcaatggctcttccgacttagagcgtcggcaaccacgttagccttaccaggatgatagtgaattcccacatcatagtctttgatgagttctaaccatctcctttgccgaagattcaggtccgactgagtgaagatgtatttcaagctcttgtgatcagtatatatttcacagcggttcccaatgagatagtgccgccagatttttagagcatgaaccaccgctgctaactccaagtcatgtgtagggtagttgccttcatgaggtcgtagctggcgtgaggcataggctaccacatgaccgtcctgcatgagcacgcaccccaatccttggcgcgaagcatcacagtacaccatgaaatccttgcgagtatccggcaagattaacactggcgaggaaaccagcttttctttgagagtttggaacgccttctcgcattgcgggctccacacaaatttctcttctttcttcaacaactgcgtcatgggtcgagcgatcttggagaagttctcgatgaatctccggtagtatcctgccaaacctaagaaactgcggacttgagtgactgtcttgggttgcttccaatcggtgacggcggtcactgtttcggggtccacagcaactcctttagcagatatcacgtgccctaagaatttgacttcggacaaccagaactcacacttgctaagcttggcatacaattgatgttcccgcaactttcccaacaccagacggagatggtgctgatggtcttcctctgattgtgagtatatcagaatgtcatcgatgaaaaccacaacaaacttgtccaagtattccatgaacactttgttcattaagttcatgaagaaggcaggagcattggtcaagccgaacgacatcaccgtgaattcatacagcccgtatcgcgtggtgaatgcggtcttcggaatatcttcttcccgaatacgtaattggtgatatccggaacgaagatcaatcttggagaatacagtggcacctttaagctgatcgaacagatcatcgatccggggaagagggtacttgtttttgatggtgacttcattgagagctctgtagtcgacgcacatcctcttcgtcttgtctttcttctctacaaaaatcacaggagcaccccatggggaagtactcggacgtatgtaccccttttctttcaactcttccaactgtttctttacttcggccagttcatttgctgccatacggtagggtcgcttgtgcagaggagtggttcctggagcaagatctattcggaactcaatctctcgcttgggcggcataccaggtagttcttccggaaacacgtctccgaactctctgactatggggatttctgacagacctatctgatgcagttctgaacttctgacagaggttggaggtgcaaagaaaacaaccggttgttctggccctcggtacagagtgacagtgcgcctcgcgcaatccactaccccttggaattgggccaaccaattcatcccaagaatcacatccaaattcttggtgtctagcagaatcagatccgagggaaaaggaatcccttgaatttctatagggacggcagggctataatactttgctgtcataacccctccaggggtggtgatgagcagagggtttctaagcctttctacccccaactgatttctccccacgaatgacacagatataaatgagtgggaagctccagagtcaaacaaaattgtagcagggatggaatgaacgaggaacgtaccaacgatgacgtcgggagttgtcagcacgtcctcggccgtcacgtgattcacacggccccgaatgacatccttcccgccgttgttggagcggggaggcgcttggccttgctgacgccttggctttgggcatttatccgcaaagtgcccgggctcgaagcagttgaagcacagacgctgctgaccttgagcgtccctgcggccttgagcgggctgcacagctggcgtaggaggacggggcgcacgagtcccttgttgattctgctgctgctgcggctgtgggacgcgcaccacgaattgtggtcgaggcgcggagcgaggttgctgctgctgctgctgctgctgcgaggaggatccccctgggtagggattggtgtagcggaccctctggttagcaccctgttgattgcggaagttcgccaagcggcgcttgtgcgattccagctccttgtgcttggcttccaagcggatgctcttatccaccagacgttggaaatcaggatagtccccagagactagacgaacggacagctcagggtccattcctgccaagaacttctcctgcttctcctcgtctgcccgcacatcctccggagcgtaccgggccagattgttgaactcatgcaaatactccatcacggagcggttgccttgcttcaactcccggaactccctcttcttaagagccacgactccggcgggcacatgggttctccggaaagcggcggtgaagcgagcccaagtaatcggctgcccctctggctgcgtagcctggaagtggtcccaccagagagatgcgggtccctgcagctggtgggcggcgaagatgactttctcttcgtcgctgcactgcaccgtgtctagcttctttcccacggcatgcaaccaatccaaagcatccacggggttgttggagctagagaaggtgggtggacggatgcggaggaactcggcgagtttagagtgttggggaggtggtggtggagcattctgttgtggcgggttttggaggtggtggaggaaagcggtcatcatgttggcttgctgggcgaggatttgggtgagaatggcgttggtgtctggcggtggtggtggaggcggaggtggaggtggaggtgggttgccctggtggttgtggttgctgccttcgggttggttgccatcaccggtagcagcatttctcctggtcgtcaccatctgaaaaaccccacacagaaccagcaaacagagaaggagctaacaattaaaactaaccacccacgactaccataattcttgaatttattactgctattaaattggttcattaatgttcaagttgcttaggcaaataaaataagacaggctccgacatagttacaccacacaccggtgtaaccatgccccacacaactcaaaaagacaaacgaggaaaaacacacgcgcaagcctactaactgctcgtctaacgctgcgacgggccaggacggaaggtgagcaacagcgcaccctccgagctaccaacgccggaggcttccccctcctggggaaccacgggcgcaggctcggcacgaggggtctcgacgaagcaggtccacgccagggactgacgaacaagctcgggcctggaggtgctcttgcgggcggtgatcttctggctgcggcagacgcggcgacgcttggggcggctgtcctctccctgggcgatcttgagctggtgcagctgcgcctccactgcgtcgaggtccttcttgagctgcaggttctcctgacgcagctccaggatcttcaggttgttctccaccatgccacgacgcaccatctgatggaagtcgatacgagccgcgtcgtacgcctccaccatgcgtgccagatgcacgacggtggcgtcatcctccgagctggcgtctcggaaggtggcgtagtcgcgggctcctccgcgacgagggtggtagcggtagggcgagtgctgcaactcgtccgggtagcgctggtgaagggtgccgatggcgaggagagcggcgttctggcaagcggcggggaaggaatccccacccgcggtgactgccagcgaagtccgctcgggagagccggagaggatcactgcagtgacctcccaaccagcgtgaggctctgcatcctcaccctcctgcttcggaagcggcctggcctggtagtccactccgtgtggataccccaagaccacgcacatgcctcgcagctccaagacgaagccagtcatgtccaaaccacgacgggtaacgctgccggccatctacaaacaaaaacaaaaagagaaacaacatttaaaagatcagattttgacgataaatgaagcagcaagacagagagagactagacaattttcacaagtaacaaaggatttttatttttgaaaatattgctaaggcttgggatctacggctcgtcctagggtcaaaggaggctctgataccaacttgtcacgaccggaaaacacccaacaggcgttcctgacgtgcgtgcattattccttgtcccaggaggcaaggtacaccaaaagttgatacaattcagagtttaacaagcggaagcgtatataaaattattacacgggcagcggaggcccaacacacaaagacaaacgagaaacagcggaagactagggcgacgaccacaggcgcttgacggcaggcacgagctagacaccaaagccttcatcttccaggaactcctcatctgggcttggggaaaattgagcaagactgagtacaaccaccgtactcaacaagacacacccacaaatgcagaataaatgcaagggagtacaagggaattataccataaaggggttagggttgcagtaaacagcatttaaagacatttagttgctcaaggccattttgtaaacacgatcctagaactatccaatattattaatcaaggccgtgaacccacacgaacctgccttaacccaaggcctatgatgattcagaccgaactggcaacccgaccctgggtcccagctcgtcctaagccaacccaggccaaccattccatattttagttgttaagcaggttttaagaattaaaacactaacttgggtacattgctcggcttgcccataaccgagggctcggctattcgaatagattatactctgatcagaggtgtacatctttacccacaagacacatcttcctcacgggtaaccacgtgccacataccaccacggtatacagacgaaagacgtgacatagtttccaacccatcctagccttagacaagagtaccgacccaatcctgcctacggccggaacccccgggacaggcaggcaggactgagcccctagcagcagggcaccaaccctctgccatatgacatctcgactaccgggccgcagctcgtgtagccttcatttgccctggagaatgtccatcgacccccgacttcatccatctccaatccgtgtacttttgtttatgactagactgagccacaaactaagccttacccactagacatgtggaagtacggtagtgctttgcaacagaggcccgaagaccggtccttaaacggccgaggtgctactatcaaaaccatgcaccccgagcccagcctaaaaccaatttaggggattttgaatagagggggcggtgtgaagccaattccacaataaaccaacaattccagagtatccaggtgatatgaatatttcccaaagtctatagttgtaaaaccacctaaggttacctaattagattgcgaagcatctacctaaaattgtactagggataccatgagtagagtgtccactagttgaggttttgtttgtctagggtgaacaaggtagtaataataacaataacaataataatatggtcataacaaaggtaaataggcatggctaagtaaaacagtgataacgcgggaatttaaataaagcgataatgcaataatttaaatcaacataattttataaaatgggattcaatatgatcaagatgatgtgtcttgccttgctcgttttcccaatcgacggcttcgacttccacgaagagcggatcttccgaagctgcagcgtctacacgaccaacggaaaagaaaaaggctttaacactaaataactccacataacagcagaaacaaagcacaaaaatgggttctttacatcttaaggaaaaattagagacttgaacggtccaattccgagttcaaatggccaagatatggccatttgaagtttatatgctctttaaatggatatttgcgaatttcttcatttaaattttaattaaaaatcccatttattgcgtcagccgagggaggggacgcgcggaccgggtccatgggggtgggggcccacgcgtcagccgctcggtccacggtggaccgggcgcacgcggctggcggcggtcggcgccgtgggtcccgcgcgtcagcgcacccgcgggcgcgggcggctggcggccgggcccacttggcagccgcgagggcgcgcccgaaggcggcctcgccggcacggccgacgggagcggcgcgcccgcgccccgatggtcaccgccggcgaccaccggcgcggcggagcggcgcccgagagagaggagggaagggggaaggcgaacggcggtcttcggctcaccccgggacaacgacgacgacgagaacggcggccggagcggaggaagacggcggcgcggctcgcgatgacgatggcgacggcgctccgacggtcggcggacggagcggagggctggacggggtcggcggcaacacggcgaacggaacggaggtgtcgccgagtaaaggaggaagtccggagcgacggcggcggcggaacggagctcggcggcgacggcggagagaacggacacggcgcgagcacgaatccgacggcgagaccaacggcgagcggcggaaacggaagaacggactcggggcgagcaattatatagcaccgagaaggggaaacgcggccggagaggaaggaaacggggcgcggggatttcggccgccataaatgcgccggcgatgaatgcgggaaggaaatcggacgaatccgagggagaaaaaaaggggaaaacgggggaaacggagagagggaatcacggggagtgattcccctctctttaatgcgcgcggggacggcgggatgcggcgcaatccgcggcggggcggcgctagggcacgggcgccgcggcgggcgccgcgggaggaaggcgatgacaggtgggtcccaccgtcagcgagaattgcgggcgggcccgcttgttagcggcgcgcgcgcccagagagaggcccgatgggccgcgggggaggagagagaaaaaaggagggagaagtcggccagaagccgggccaaagagggagggggggggggggaaaaaaaaaacttctttttaagatttcttttttttaacttttcannnnnnnnnnnnnnnnnnnnnnnnnnnnnnnnnnnnnnnnnnnnnnnnnnnnnnnnnnnnnnnnnnnnnnnnnnnnnnnnnnnnnnnnnnnnnnnnnnnnagattttatataaagatatagtgatagtagagagtatatagttttttgttttttttcgtatttttttttaataattatttgtttgtttttaagaagagatttatatatattatttatatatttatatgttttttttttttttttagaatatttgtgagtaataataatatatataaagtatatgtaaaaaaaaataaaaaaaaaaaaaaaaaaaaaaaaaaacccccccgggggggcgggccccccgggggggggaaacccctctttcccggggggatccgggggttgtgggggggaaaaaaaaagaatggagtttaataagggggggggtttttttttcccccacccccgtggatttttttttcccccgtttcccggtcgcccgggggcctccgccgtcgcctccgagcccctttaaaaagaatccccgtgctcttctcttctcgccttgtcgcgccccaaatcgactctaaaatctatcctcgaaattgtgcaaagaataattaaaattccatgtgaaagcctccaacaattaaaatgtgcaaagataaaagtaaaatgaggcttggaggatttttgtatatttcctaaaagcctaaaatgcttaaacaaattttagtggaattttaagagaacaaataataattgaaaagaaataaacaaagttgaaaaggtttcccccccaaaaagaacttcttttaggattttcttttttttttaaaccttttcaactttgtttatttcttttcaattattatttgtgctctgaaaattccactaaaatttgtttaagcattttaggcttttaggaaatatacaaaaatcctccaagcctcatttgacttttatctttgcacattttaattgttggaggctttcacatggaattttaattattctttgcacaatttcgaggatagattttagagtcgatttgggacgcgacacggcgagaagagaagagcacggggatccttttaaaggggctcggaggcgacggcggaggcccacggcgacggcaacggcgaaggaaactcgcggcttggagagaggaaagccgatccgattcgaactcgaatccatcgatttccaaaccgatttagccgaagtttccaaaggagaaaaggtagaggagatcccgaagatcatttcccctctatcaattcagccggaaacggaaaggagcggccggattggaaagcggcggcgacggcagctcggcggcgcgaaactagggtttcggcccgaggaggacgacgggcctgacaggtgggacccacctgtcagcggctgcgagggcgcgcgcgcgcgcgggcggctgcggactgggccggctgggccgaggagagagaagagaggttttgggccgactttcggcccaaagccaaaagagactttttaaaacctttttcaatttaaattatttcttaaatgcaattccatttattaaaaatacttccttagctcaaataaatcccagaaaaatctaggaattatagaattaagcaaagtatttaatgaaattttatctggcccaattttatattggaatttattaattaaacttagatcttctcttcaagacttttaaaattatttctagaaattccaattaaacaacaatttatatattttgaattttcagggtgtgacaaacctaccccccttaaacagaatctcgtcctcgagattcggaagaactggcgaacagaagcggatgagctgacttcaattcatcttctcgttcccaagttgattcttcttccgagtgattactccattggactttgcaaaaacggataactcgattcctggttcttctctcacttgtttccaggatacggattggtttctcaacataagtcaaatcctcttggacttctatctggtcaatattagctccttcggtaggtacccttaaacactttttcaattgcgacacatggaacacattatggactcctgccaaagattgaggtaactccaactgataagcgacctctcctcttctactgacaatcttataaggtcccacaaaacgcggtgccaattttcccttggtatgaaaacgatgaactcctcgaagaggcgtgacacgaagatacacataatctccctcttcaaaactcaaatctctgcggcgattgtcggcataactcttatgtcgagactgagccactcgcaatctttcttgaatgatctttaccttttcttctgcttcccttaggatatccgttccgaaaacctgacgttctcccgtttgatcccacaaaagcggagtgcggcacttccgaccatacagtgcttcgtacggagccatctgtagactagcttgataactgttgttgtatgaaaattctgcataaggtaaattcttatcccaacttccaccgaaatctaaagcacaagctctcaacatgtcttccaaaatctgattcaccctttcggtttgtccgtctgtctgtggatgataagcagtactaaagttcagcttagaacccatctcttcctgaagtttcttccaaaaatttgaagtaaattgactgcctcgatcagacactattttcttagggacaccatgcaaacacacaatccttgccatatacaattccgctaagcgacttccggaataagttgtctttaccggaatgaaatgagccactttggtaagtctgtcgactatcacccaaatagaatcatggcccgatgacgttctgggtaaaccagtgataaaatccataccgatttcttcccatttccattcaggaatcttcaaaggctgcaacaaaccggctggtttctgatgttctgccttgactcgctgacaaacatcacatactgctacgtattctgcgatttcacgcttcatacttgcccaccaaaatctttccttaagatcctggtacatcttagtactaccagggtgaatggagtataaagtatcatgagcttctttcagaattgcatcctttaaatctttgttgtcggggacacagattctctcacccaaccatacagttccgtgctcatcctccaagaaaccaatagcttttcctcttctcatattcttcttgatctcttgaatatcaggatcattaatttgggcttctctaacttgatcaattagagtgggcttcgcttctaaggctgcaacgaaacctctaccgacaattcccaaatttaatctttcaaattccttgcataattccaatggcaactgtcgtccttctgtagcattgcaatagccttttctgctaagagcgtctgctacaacattagcctttcccggatgataatgaattcccatgtcataatccttaattaattccaaccatctccgttgtctcatgttcagatctggctgagtaaagatatactttaaactcttgtgatcggtgtacacttctgtacgagtaccgaaaagataatgacgccaaatcttcaatgcatgaacgactgcagctaactcaatatcatgagtagggtagttcttctcatgcggacgtaactgtcgagaggcataggcaaccaccttcccatcttgcatcaaaacacaacctaacccaagtttggatgcatcgcaatacacttggaaacccttctttggatcaggcaaagtcaaaataggagctgatactaagcgattcttcaactcttgaaaactctgctcacattcttccgaccacttgtacttcacatctttctgaagcagtcgtgtcatgggcttagcaatcttggaaaaattctctataaacctccgataatatccggcaaggcctaggaaactgcgaatctctgaaactgtctttggttgcttccaattggttacggattccacattactaggatcgacggcaactcctcctgctgagatgacgtgaccaaggaatttcacttcagacaaccaaaattcacacttgctaaacttagcatacagttgatgttctcgtagcttctccaatgcaaggcgaagatgttcctcatgctcttctttggttcgagagtagataagaatatcatcaataaagaccaccacgaacttgtctaagtattccataaacaccttattcatcaagttcatgaagaaagcaggggcattggtaagtccaaaagacataacagtacattcgaacaacccatacctagtggtaaaagctgtcttaggtatatcttcctctttgattctcaactgatgataccctgatcgaagatctatcttggaaaaaaacagtggcacctttaagttgatcaaacagatcatcaatcctgggtagtggatacttattcttgatagtcacatcgtttagtgcacgatagtccacacacattctctgagtatggtctttcttttccacaaaaataaccggagctccccatggtgatgaactcggtctaatgtatcctttctgtagcaaatcatctacttgcctcttaacttctgccaactcattggctgccattcgataaggtctcttatggatcggagttgttccaggtaccaaatctattctgaactctatatcccttttaggcggcataccaggtaaatcatctgggaacacatcaggatactcccggactataggaatctcttccaaagttatctggttcagtcttgaccttaaagactcagatgacaatgcatgaacagttacaactcgaccatcatagctgttgagagttacttttctgttggcacagtctatcacacctttatgtctggctaaccagtccatccctagaatgacatcaaggtctttggattttaacaagataagattggccagaaatggtactccttgaatttatattctgacagaggggctacgttgcaaagagagtgcttgatcacttggggtactaaccatcaaaggacgtctaagatcttctacttccatcccatgatttcccgcaaaactcatagataagaatgaatgtgtagcaccagaatcgaaaagtactgttgcaggaactgagttaacaaggaacgtacccaaaatcacatctggagcatcttgagcttctgcagcagcgacatgatttacacgagccttggatgctggtacagcagagttattctgggtagggacaaccttcacgcgtcggggcttcggacacttgtcagcataatgtcctggatctccacagttgaaacacaccacgggcttgctgccttgctccctcttggcaggttgttgctgtgctggagctgcaacaggacgtggagcttgattacggatgttgttgccagcattgttgttgaagaactgacgttgcggacgaacaacagacgaagaacctccctgtggcatggactggggtcctaaagtaagacgcggcttctgattattcccctgttgtgtcttgaattgagcaatccgacgtttcttctgctccatgcgattgtacttgtcctcctgacgaatagccttatccactaatttctggaaatcagggtaatctccaaccatgagtgggtaagaaagctcatcattaagtcctcccaaaaacttctcctggcgctcttcatcattgcgcacatcttctggagcataacgagcaagacgattgaactcgtgcagatactccgtaacagagcgagatccctgagtaagcgacctgaactccttcttcttgagagacactactcccgatggtatatgcgtcttccggaaagcagcggtgaattcaagccaagtgataggttcagcagtagtcctgttaaggcggaagtgatcccaccattcagaggcagggccatgcaactgatgtgatgcaaatgaaaccttctcctgatcagtacactgaagtaaatccaacttcttctctatggcatgcagccaatcactagcttcaacaggattagtggtactagagaaaacaggcggcctcacacgaagaaattctgctaacttgttttggggaggtgcatgattattcccttggttttgctgattctgaaattgctgcatcatcatgttcataagctgtgtctgttgagcaagaacttgggccagagtaggattctctccattgttgttattggggttgttgggaccattcccattgctgcgagtgttcaccatctggcatggacagggcacaagaagagaaaacgggggaaactacttaggatagagaattactttgacttttattgatcttaactgagtttcattattacaaactgaagactctcacaccactaaactcaccaacttcctaacactcaaaagcaaacaaacacatgcaattacatcccaccactgatgtaaatcacatgcaagacccacacacacacaagcaaacttaaaacaagcaaactaacacaacgatctaagacaacggcttaacaagtcactctagttcttccaagcatcggaggtcgattgaaggctcgttcggctcatcttcctcatctttgatagctacccactcaaacttggaattgttgcgcttgggttcttcttcttcatcactacttatgatgatgaccggaggatccgcttgagctggggcaacttctttctccaccacacgaacctttggcgccagttgatagcgagggacaaataaagctctcttccttgcggtaagacgaatcctggccttctgcggcggtgcttctcccttcaatgcggctaattccttttccaaacgatccaccttgtcttctaacttgcaaatcttaccacgattccgatcttcacgatcttgagctgctaacacagtctccgcacgactttcatccatagcccacaacatctcaaccaaatgtttcgtggtaacatcattctcaattccttcagtctcaaggtaactgccacggtcacttccctgaggttggcgaggatggtagcgatactcagtgtcggccaattgatcactgtagcgatcacggagctctcctatggcgatccttgccacctcctgacatgcatggatgtagtttcttcctccagcttcaaacattactgaggggacctcttcactattgctgttcaaggtgactttgactcggcacttctcttcatgacgatcatgaggaatctgggtataaaaaggggcagtcccgaatccaatgacaaaggacatcatacgcaactcctggacaaaaccctcaacaccaaacaggtactcaggcttgtaacgcggcatctaaagacaagtgaaaggagggagttaagacctttatccaattaatagcacaagtttttggattaatttgaataaagttagaaaatcagagtaaaaaggtaagtaaataaagtaaaccaagctttgtgaaataaattaaaacagttggaaacgaggtcacaaattttgtaattttgaataactggtttcaaaagaaagttataaaatcaacatactaaatttattttattgcagcaaaattaaataaaacagtattgtaaaacttttgctggtaaatgagccattagtacagtaatagatgtacagtactaataacactggaataaatttttgaatgagaaccattaaaagagattatgaagtgcatgtgccattagtttggtttaattaaaagagaaagggaggagaacagttctacttttccaatatttttcagagggcttctatgggtaaccatttggcataacctagggtcaaagatgctctgataccaacttgtcacgcccggaatttctatccaaaattccaaacgcttacatgtgtgtgaaccctcgtccaggaatcagccgaggcacacaataacaaattgataatagagtacaaatattactctaattaataagcgaataaaatgtcattacagaggtagatagttcctctcaatcaataaagttctaagcagcggaaaataaataaacggcgcagacggctccactccacaggcagcttgaccaaggctacacctaatcctccacaccatcagcctcattgaagaactcttcctctgatgaatgattgcaaggtgagtatatgacatactcagcaagccacgcagcaaatatgcaagtgcacaggataacaaaggatggcataatagggttccatttgcaaaagcagcatttagcaaacatttgagaatttaacaaaacagttaagtaataattaagcaatattaaaccaacgctatacaacataccctgttgtataggcccaaccattctgaacaaccaccccggctgcacagttctatctccaaaccaggaatgtaccattccaaaccaggagctaatcaaattattaccagtttaagcatcttttacaatgatgagaggtgtgagactaatcacgaaagacattgttagacccgcccataaccgcgggcacggctattcgaatagttttactctgatcagaggtgtaccactgtacccacaagacacaaccccacatcatgtcaccatgtgcctcaataccaccacggtatctcggaaaggagttgtgacaatacccttcgcataacacaatccactgcagcgcaccttcctggatcataatcacccccttataaaacaaggcatggactccccagcgacccccgtgggcttatctccgccacttctcagtctggtgccccgcaatgaaccatgctatacaaaagataaagccgttgcccatgctggcttgtggttggcacgataaatgtttcacaaccgaaactcgtgaaccggtccttaattgccatgagcacgaccttcaaatccatgtgctcacaacccaccattaccaggttttagttggcacattaattaattaactaatcacgattgaccaccgtgaactatcaataagccatcatgaaataatagtgagtcattagttatcccataagtgtactaatgtttctaagcagggctaagcaattatatctaatatctagttgaaccaatataaataaagctcaactagtcaaattataataacccaaggtatcaaggaataaggtaatcaagaacaaaagggccataacaatcaataggttaattccacccaatgacattcgaaaatagatgcaatagttgaatagaaacaatagctttaaataggatcaacatgctcaaagggttgtttgggatctgtgtgacttgccttgttggccttggaactcttcaaactcttcttccgcgaaaacggactctctggaaacgacggaatctaagcaaaaagaagcaaaatcaccaaaacagcacataaacaagcatgaacagtttgtggatatttttaatgtgtagatctcaattttagaaaaatttagagacttgaaccaactaaatcggagctaagatgaattagttatgaatttttaaagattaaaccggattaaaacacttaaatcggtttaaaattgaattatgacgcaataatgaattatttttgaaaaggaaaaggggatttattgcgtcagcggctagggtttgggtggaccgggcgcacgggcggcggttcacacgaacggacggccgagattgatccgatccaaatcggacggccgagatcgatcgggaccacggcggttcacggcggacggccttgatgacgccagcaatgatgtcaccgatggcggcggcggctcggcgaggcagacgactcgagcggcgcacgctcaccggcgaacggcggcgctacggcacgaacggaggacaccaacgggtagcggacggcacggcgaactcaccgacgaccaaagcgacggcggacgaccaacggacggcaacggcgacgaggttgaaacggcggcggtcttcggcttgacgacggcgacgatgctccggcggtctccgacggcagcgaaagagcggacgaggacggcgacgacttggcgacgacgacggcgaccttcccgagcgacggcgacggctggaacgacggcggcgcacggctggagcggcggcggcgaaggcaaagctagggcacacggcgctagggctactccggcgacgagaggcgaaggcgagggtggcggcgtgtcacgaccggaaaacacccaacaggcgttcctgacgtgcgtgcattattccttgtcccaggaggcaaggtacaccaaaagttgatacaattcagagtttaacaagcggaagcgtatataaaattattacacgggcagcggaggcccaacacacaaagacaaacgagaaacagcggaagactagggcgacgaccacaggcgcttgacggcaggcacgagctagacaccaaagccttcatcttccaggaactcctcatctgggcttggggaaaattgagcaagactgagtacaaccaccgtactcaacaagacacacccacaaatgcagaataaatgcaagggagtacaagggaattataccataaaggggttagggttgcagtaaacagcatttaaagacatttagttgctcaaggccattttgtaaacacgatcctagaactatccaatattattaatcaaggccgtgaacccacacgaacctgccttaacccaaggcctatgatgattcagaccgaactggcaacccgaccctgggtcccagctcgtcctaagccaacccaggccaaccattccatattttagttgttaagcaggttttaagaattaaaacactaacttgggtacattgctcggcttgcccataaccgagggctcggctattcgaatagattatactctgatcagaggtgtacatctttacccacaagacacatcttcctcacgtgtaaccacgtgccacataccaccacggtatacagacgaaagacgtgacatagtttccaacccatcctagccttagacaagagtaccgacccaatcctgcctacggccggaacccccgggacaggcaggcaggactgagcccctagcagcagggcaccaaccctctgccatatgacatctcgactaccgggccgcagctcgtgtagccttcatttgccctggagaatgtccatcgacccccgacttcatccatctccaatccgtgtacttttgtttatgactagactgagccacaaactaagccttacccactagacatgtggaagtacggtagtgctttgcaacagaggcccgaagaccggtccttaaacggccgaggtgctactatcaaaaccatgcaccccgagcccagcctaaaaccaatttaggggattttgaatagagggggcggtgtgaagccaattccacaataaaccaacaattccagagtatccaggtgatatgaatatttcccaaagtctatagttgtaaaaccacctaaggttacctaattagattgcgaagcatctacctaaaattgtactagggataccatgagtagagtgtccactagttgaggttttgtttgtctagggtgaacaaggtagtaataataacaataacaataataatatggtcataacaaaggtaaataggcatggctaagtaaaacagtgataacgcgggaatttaaataaagcgataatgcaataatttaaatcaacataattttataaaatgggattcaatatgatcaagatgatgtgtcttgccttgctcgttttcccaatcgacggcttcgacttccacgaagagcggatcttccgaagctgcagcgtctacacgaccaacggaaaagaaaaaggctttaacactaaataactccacataacagcagaaacaaagcacaaaaatgggttctttacatcttaaggaaaaattagagacttgaacggtccaattccgagttcaaatggccaagatatggccatttgaagtttatatgctctttaaatggatatttgcgaatttcttcatttaaattttaattaaaaatcccatttattgcgtcaccgagggaggggacgcgcggaccgggtccacaggggtgggggcccacgcgtcaccgctcggtccacggtggaccgggcgcacgcggctggcggcggtcggcgccgtgggtcccgcgcgtcaccgcacccgcgggcgcgggcggctggcggccgggcccacttggcagccgcgagggcgcgcccgaagcggcctcgccgggcacgcgacgggagcggcgcgcccgcgccccgatggtcaccgccggcgaccaccggcgcggcggagggcgcccgagagagaggagggaagggggaaggcgaacggcggtcttcggctcaccccgggacaacgacgacgacgagaacggcggccggagcggaggaagacggcggcgcggctcgggatgacgatggcgacggcgctccgacggtcggcggacggagcggagcggcggacggggtcggcggcaacacggcgaagcggacggaggtgtcgccgagtaaggaggaagtccggagcgacggcggcggcggaacggagctcggcggcgacggcggagagagcggagcacggcgcgagcacgaatccgacggcgagagcgagcggcgagcggcggaaacggaagagcggagctcggggagcaattatatagcaccgagagggggagaacgcggccggagaggaaggaaacgggcgcggggatttcggccgccatagatgcgccggcgatgaatgcgggaaggaaatcggacgaatccgagggagagagagaggggaaaacgggggaaacgggagagggaatcacggggagtgattcccctctctttaatgcgcgcggggacggcgggatgcggcacaatccgcggcggcggcggcgctagggcacgggcgcggcgggaggaaggcgatgacaggtgggtcccacccgtcagcgagagtggcgggcgggcccgcctgtcagcggcgcgcgcgcgcgcggggaggccgatgggccgcgggggaggagagagagagagggagggagaagtgggccgagccggcccaagagggaaggggggggggaaaaagaacttcttttaggattttcttttttttttaaaccttttcaactttgtttatttcttttcaattattatttgtgctctgaaaattccactaaaatttgtttaagcattttaggcttttaggaaatatacaaaaatcctccaagcctcatttgacttttatctttgcacattttaattgttggaggctttcacatggaattttaattattctttgcacaatttcgaggatagattttagagtcgatttgggacgcgacacggcgagaagagaagagcacggggatccttttaaaggggctcggaggcgacggcggaggcccacggcgacggcaacggcgaaggaaactcgcggcttggagagaggaaagccgatccgattcgaactcgaatccatcgatttccaaaccgatttagccgaagtttccaaaggagaaaaggtagaggagatcccgaagatcatttcccctctatcaattcagccggaaacggaaaggagcggccggattggaaagcggcggcgacggcagctcggcggcgcgaaactagggtttcggcccgaggaggacgacgggcctgtcaggtgggacccacctgtcagcggctgcgagggcgcgcgcgcgcgcgggcggctgcggactgggccggctgggccgaggagagagaagagaggttttgggccgactttcggcccaaagccaaaagagactttttaaaacctttttcaatttaaattatttcttaaatgcaattccatttattaaaaatacttccttagctcaaataaatcccagaaaaatctaggaattatagaattaagcaaagtatttaatgaaattttatctggcccaattttatattggaatttattaattaaacttagatcttctcttcaagacttttaaaattatttctagaaattccaattaaacaacaatttatatattttgaattttcagggtgtgacagtcgccttcaaacttaaaatctgagaaacttcttgtgtaaaacttgggttttacaaaagacttggaaaacccgacacctgggtcggtgcttgcgaactaaatgaatttccaaaatcgcggaccgaggaacgtaccgggtgtacggtttcccgctcttgcacttaaggaccgtttccttggaatttcatccgaacataagacaagtacgaccacatgggtggaatgggacacccctggctgagtaactagcttatcgggggagccatgatgccaagagacatgtggattcgccggggtggtgtcggggaggacctctgggcttcctggcacagtatggtctgggacctaatctggtgttggtctaggacccctctcgttggcatatggtgaacctgtgttggctttcgaaatgccttgtcatgaaagccttaaggtctctagtcgtggccgttctgcacgggctggatgatccgggttagtaatgtcgtgtgggtaaagtgtacccccctctgcagaggttattaaaactgttcgaatagccgtgcccacggtcatgggcggatgtgaggtgattcctagcgtagtttttgtttgactactgccttgtgaaatttgctgttgtggaatgggtttgatgtttggaaaatctgcggctgatgggatcagccaggcctgggtggccgtttgaaagctgttggccgggtgccaatcttgatcaattcaaaagattgaatcattgcacatactccgaccggacgagacgcactgtctcatccgtgtcgtttgagaagcactcccttagttgtttcagaaaagagtttaaataaaatcaatcgcaaaaacaacggtctttctttgaagcttgcattaaacacttatttcccatggcttgctgagtactcctgtactcacccttgctctatataaataatccccccccagttgctgaagaagatgaagcggatcccgctgacgaggagttcttccaggagcaaaccggctacgatgagttttagggtttcggcctagttcccaagtcgcgcctgtgatgtttggtccaagtcttggcttccgcttcccttttgtaatgcagttgtgagctcgagatctgtccgcagcccaacatgactgtactcctactctataataaagagacctctgttgctgtgatattccgtcttcctgtgataccagcactgtttcctgggactggtatcggttaacaggttaatttggagcgtcacgggctagttccgctcgggactagttcggggcgtgacaagagatggtatcagagcacaggcttggccctagggcgaaacccaacgtttaggacgaccctaaggatactaagttcaaaactacttgcgaaaagctaaggcttcttttggtttccttattttcaatagtttgttgctaaaatggttactgatcttctctccctctttcaaaattgtagatggcagtgaacgccagcttcagttcccacggttttggtgagggtcaccacgtcgctcagcttcgtgacctcgcccgcttccttggcttctcgtgtcccgagtacacggggtactccgtggaccgtgttccccctcgctgtgagctctctgtgtacctttatcctcgtggaggtatacacggagctggcctttgcccacaccacttcactgtggccaggcccaccctccagatcgtgtaccaggacctctcctggactgcgctacgtcgcttggcccacgactacagccaccgtctcgggggctctgccttccggcagtttccacgccttccttctggccacgcagatgctaggtacccttgtccgtacagcgagtctcagccagtgctgactcgcatggttgagctttcggaggctcaggccactcagcacgacctactccttgaggcttaccgctcccttgcccgccgctacaccgctctggaggcccgttaggccgaggagggtgtcacctcagttgacactgtctcttgggactcaggctgcctctgccacgccagccacttgtcctcccacagctctcgcggctcagctcgcactcctagtggcgcgcgctcccccagctcgcgtgcgccgtactcaccagtgtactccccctacagacacccagttagcccatcctacacccccggacacaccccagttgcttcctcccgccgtggcccacgctttatccgcactgcgcggaagcgtgttgttggttcttccaccatgttccgcttcgactacccaactcccccaccgccagcggcccgtgccgctgccggccctcgacaggttccgccggtcccttcgcgtcagccgatcgacgtttcttcgactaaggagccgactacaggaggcagccaggtagacgaggagtggaggaggcagtcttcagcagccgcccgtgtgctaggccctttttttccgccgccaactcttttggagtcgtggcgaggtagggcgtgcgtgtgtttgatgtgggtgttgtttggtagtctggttctcctaggtggtgtgcgtacagtcaagctcggcgtagctctgtgacttgtccacacccgttgtattaggtgtttttatgatttggagaatccagtttatgcctagtgtgtgctatctgagttgttatttactttgctgcttgccctcctaagtgcttatctgattcttacctcgccctcttcggggagtttagatggctaaccgcccccgccgtgctgctcatgcaccagcccgcttcggttttgaggaaggtagagttgggccagaagcaaatcatgagtcggctaatgagcagtctcaccatagcaaccgttcacaccatactgcttcccgcaatgcagaaattgagcaaccccaccgcagcgatcgctcgcatcacacagcttcccgtattgcagaagtggaatagtctcaccgctcttaccgcactgccagtcacaattctggagaagaacgcatcccttccccacctcgtgtggaaaacaacatgcagcacttaatagcagtacagacacaaatcttgcaaggattagccgcagccatagccggttttcatcataatgcgcatggaaatggccaccctcacatgagcaacaatagatccaagctgacagactttctgaggtctcgttcgccagagttctctcagactgtcgagcccattgaggctgacgattggctgaaggatgttgatagaaaactcaacttagtgtagtgtactcctgttgagaagacgctctacgcctctcaccagctaagaggacctgctgcagattggtgtgagaattactgcaatgcacaccctgaacccactaacattgcttgggatgagtttgctacggctttccgtgcaactcatgtgcctgaaagcaccattgatatgaagaaagaggaatttaacaggcttaagcaaggcaacaacagtgtcaatgagtacctaagtcagttcaacaagttggctcggtacgcccctgaggaagtggacacagacaagaagaagatcaggaagttcttgaaagggatcgcggttggaatgagactccagttgcttgctcctgacttccccacttttcaacatatgatcaaaaaggcacttctacttaaggatgccagaaaagaggctaccgaagaatacaagaaacgcaagtctaaccatcagggaaattcttcccgagacgcacctcgccctcgctatggtcaacccatgcaatatcaccaatcggtcactcaggctaaccgccagccaagctacgcccctcgtcctcagatgaaccgtccggcacctcagccacagcagcgtgcccctagtggcaatactgcgccaaacagtgttacctctttcaagtcactgctaggaccgtcagcaattcagtgtttccggtgcaaccagatgggtcactatgccagacagtaccctcaaaatcctaccaacaccaactcagggcatgctaatggcagcactgccagaactcctactccagcggcagctcagtctcctcctagctctcaggcaagcggacaaggttctcgtgcttccaacaattttggtcgaggccgggtgaaccacattcaagctgagaccgctcagaacgctccagacgtcgtgatgggtatgttctctgtcaactccgtacccgcaatagttctgtttgattcaggagcttcccattctttcatatcacaagcttttgtgaaaagaaatggttggaaaacccaaaatttacgtgtaccaatgatagtacattcccctgggaggaatataagggcaactcaaatatgcccggaagttaaccttagaattgaggaagttgacttcctagccaaaccgatagtcctagactcgcaaagcttggacatcatcctagggatggattggttggctaagaacaaaggacaaatagattgtgccgaaaagtccatcaccttgcaaggacctggaggaaagcaagtccgctttacctctaacacccctaccgcaagtcggtctaacctaacctgtttacaagtcacctccttggagtcggtgcccatagtctgtgaatatcccgacgtatttccagaagaattaacgagtatgccaccagaccgagagattgagttcgccatagaactggcaccaggcaccgcaccaattgcaaaaagaccctaccgaatggcagctaatgagttagcagaagtcaaaagacaaatcgaagaattggagagtaaaggttatgtgcgacctagctcatccccttggggagccccagtgcttctggttaagaaaaaggatggctctgagagaatggtaatcgactatagagccctgaatgaagtaactataaagaacaagtacccattgccacggatcgacgatctgttcgatcaacttaaagggtcaagagttttctctaaaattgacttgagatcaggttaccaccaattgaaaatcagatctgaagatatcccaaagaccgctttctcaacgcgttatggtctatatgagttcacggtgatgtccttcggactcaccaatgctccagcattcttcatgaacttaatgaacaaaatcttcatggaatacctggaccagtttgtcgtggtgttcatcgatgacatcctgatatactccaagaatgaggaagaacatgctgaacacctgaggctgataatggaaaagctcagggatcatcaactattcgctaaattctcgaaatgcgaattctggttagaccgagtagcatttcttggacacgtgatctcctccagcggtgtcgaagtagatcccagcaaggttgaggctgtacttgcttggaacccgcccaagaatgtgtcagagatccgcagcttccttggcttagctggatattatcgaagattcattgaaggattctctaagctagccagacctatgaccgagttgttaaagaaggaaaagaaatttcaatggtctacagcctgtgaagacagctttcaagaaataaagaaaaggttgaccactgccccagttctcaccttgccagatatccgaaaagatttcgagatcttctgtgatgcatcaagacaaggcttaggatgtgtcctaatgcaagaacaaaaggttgtggcttatgcatccaggcagctcaggcctcatgaagtcaactatcccacccatgatctcgagttggcagccgtggttcatgctcttaagatctggaggcactatttaatcgggaacagatgtgaagtatacaccgatcacaaaagtcttaagtatatcttcacacagaccgagttaaatatgaggcagagaagatagttggaactaatcaaggattacgatcttggaattcattaccatcccggtaaagctaatgtggtcgctgatgcgctaagtcgcaagacctattgcaatgtagctcaaatatggcctgaccaagatcgcttgtgcagagaattggagaagttaaggctgaccgtggtacagtcaggtgtccctgccagcttgacagtgcagcctaccctagaatcgcaaatccgggaagctcagaaagatgaaaaagggataaaagaattaataaaaagaatacagaagaagaagggcaccgatttctccatagatgatcaaggcacagtttggtgtggtccacgcatctgtgtaccggccaagaaggagttaagagatctcatcctaaaggaagctcatgagtccgcctactccattcatccaggaagtacgaagatgtaccaggatatcaaggcatacttctggtgggctggaatgaagcgagatgtcgcagaatacgtagccctgtgtgacatttgccaaagagtcaaggcagagcatcagaggccagcgggtctgctgcaacccctaccgattcccgagtggaaatgggaagagatcggaatggatttcatcactggtttgccaagaacccctagcgggtacgactttatctgggtaatcgtggatcgactcacgaaatcagctcatttcgtgccagtgaaaaccacctttgatggaaagaaactagcagaactctacatgacccatgtcatatgtagatttggctatcccaagaagattgtgtcagaccgaggcactcagttcacctcaaggttctggaagcagttgcatgaagctctcggaaccgatctaaattttagtacagcttaccatccgcagaccgatggtcagacagaaagggtaaaccaaatcctagaagacatgctacgtgcgtgtgccctggatttcgaaagcacttgggatcattgtttgccttatgctgagttctcatacaacaacagttatcaggccagcattcagatgtcgccgaatgaggcaatgttcggaagaaagtgccgcactaccttgtgctggaatgaggtgggcgaagcactggtattcggtcctgacatgctcaaggcagcagaagaacaagttaagctgatccgagaacgtttaaagacagcgcagaaccgtcaaaagaattacgctgacaatcggagatcatgtgtacctgcgggtatcgcctctccgtggtatgaggaggtttgggatgtctggcaagttagcaccccgctacatcggcccctacctcacaaccgccagacgtggcgaagtggcttatcagtttgagttacctgaaggtctcacagatgtgcacaacgtgttccacgtatcccagttaaagaaatgtctttgagttccagaagaacaagttcccctgggtaatatcgagctagaaaagaatctgacctacaaggaaagaccgatcaaggttcttgaagaggtagaacgtcagacccgaaggaagactatcaagttctacaaggtccaatggagcaatcattctgaagatgaggcaacctgggagcgagaagatcttctccacgctgagttcccggagctgctcccttaggtactgaatctcggggtcgagattcttgttaggggggttggtctgtagcgcctgttctgtcgtggcgcctagcgggaaaactatctcttaaaaaccttatttgcgaaatccgtttctttgcttgttgtctagtgtccgtgccatctcagatctcaaatccccgatctatcgtcgaattcaatcccgaatccaaatccttcccaaatcaaatccctctgcaaaagtctattttgcctccctcgggtttgatgggccgaactcctctcggcccatctccccctccctccccggctctctctctctctctctccctctcccccgctctgcccgtgcgctgcgcacgcgtgcgtgtgagccgcgccgagccgagcgccctccgccctcgctgccgcttctcgccgcgccgcccgttgcttcccgcgcgcgcgcgccatggtggccgaccgcctggtcgccgccaccgtcagcgcctgcccgcgctagccgcccgtgtcgtcgctccgctccaaaccgccccgccgtcatcgccgtcatcatcgactcggccccgtctctccccgcgctagcctccaagggacggaggcagagctcctcctccctctgccgcgtcgccccatcccctcctccttttcccaaagtggcaaggggcaagccccctttcttccttcctttttccttttcccctcgccgccggcgtcatccgcctctgtcgccgttttggccgcgagcgccgagcgccagctcgcgccttgaccgcccaaggtcggtttccaaaccgacatcatcgtcctataaaccaaggcgccctcccatcgattcctcctcccgtttcgctcgccgccaccgcgccattgccgcccctctgtctcgcctccgccgttcatcgccaagcaccgggagagccggtgcgttcgtggacgcggaaggggactccgggcgctcgccttcttcctcttccccggcccgaggccggagagatcactcccgtgccatcggcctctcgtcacagcgccccgcctcatctcggtagtgcatctccccgttctccctcctcaatccatctcttccccttagttttcggtagtagcatgtgtagcccccccgtagctagccggcgccgccctgactgctgccgtcgctcgccgtgtgctcgccgccgtcaccgcccgagctcggaagcgcctctcgtcgccggcctccctcgatgcgattcctcctaatccggcgcaaggggtggattcccgtagccgcgtagatgctctcaccgccgagaatcggcccctcgtgacctcgtcgccgtttcccccttttctctccaccggttgccgccgccgcaatccgccgccgtcgagcatcccccggcgaatccgagccattggctcgtctccccttgtcctgcgcaacatcccggtgtgctcgccttcgcctgtatcgccatggtttgctccgccgcttgccgctgtcgaccgccgtccgttccagccggcgtcgtcgtctacctcccgccggcccgcgtggcagccacgtaggcgccacgtcggcgccacctcagccgcgaccgggtcaagtagaccccggtccgccgcttccctccgcaccgcgtcctccgcgaaccgcgcgcatgcgccgcgcctccctccccaaaccctagcacgccccgcgtgcacctcgctcacggtgagccgagtcgtcgacaagcgggtcccacccgggaccacgcgggatggacccgacccactggctctctctctcccctccccgcccgagccgccccattctctcgggccgcgccctcaaatctcgagatgtatctaatggcacgcttagaggtcaataataaggctttattttcgccatttgctgagttgtcccgtttcgcgtgtagtttcggagcccgaagacccgcagtgcgaggatttcgaggatcaagctcaagatctcgagcgaggcaagccacctttgaacatcttgagcctatatttgaacttaattatattgcttgaaaaatattatgcattgataggatcgcacttaatctgcttgtcccgtctgcaaggcagattggcggacctacctaatttgttgcatttgacccttccattgtaattattataccatgttcccttgtatccacctagttgcgcctcggtaatcgtgcactcggcacgggtatcgacggtcgccttcaaacttaaaatctgagaaacttcttgtgtaaaacttgggttttacaaaagacttggaaaacccgacacctgggtcggtgcttgcgaactaaatgaatttccaaaatcgcggaccgaggaacgtaccgggtgtacggtttcccgctcttgcacttaaggaccgtttccttggaatttcatccgaacataagacaagtacgaccacatgggtggaatgggacacccctggctgagtaactagcttatcgggggagccatgatgccaagagacatgtggattcgccggggtggtgtcgggaggacccctgggcttcctggcacagtatggtctgggacctaatctggtgttggtctgggacccctctcgttggcatatggtgaacctgtgtcggctttcgaaataccttgtcatgaaagccttaaggtctctaatcgtggccgttctgcacgggctggatgatccgggttagtaatgtcgtgtgggtaaagtgtacccccctctgcagaggttattaaaactgttcgaacagccgtgcccacggtcatgggcggatgtgaggtgattcctagcgtagtttttgtttgactactgccttgtgaaatttgctgttgtggaatgggtttgatgtttggaaaatctgcggctgatgggatcagccaggcccgggtggccgtttgaaagctgttggcccggtgccaatcttgatcaattcaaaagactgaatcattgcacatactccgaccagacgagacgcactgtctcatccgtgtcgtttgagaagcactcccttagttgtttcagaaaagagtttaaataaaatcaatcgcaaaaacaacagcctttctttgaagcctgcattaaacacttatttcccatggcttgctgagtactcctgtactcacccttgctctatataaataatccccccccccagttgctgaagaagatgaagcggatcccgctgatgaggagttcttccaggagcaagccggctacgataagttttagggtttcggcctagttcccaagtcgcgcctgtgatgtttggtccaagtcttggcttccgcttcccttttgtaatgcagttgtgagctcgggatctgtccgcagcccaacatgactgtactcctactctataataaagagacctctgttgctgtgatattccgtcttcctatgataccagcactgtttcctgggactggtatcggttaacaggttaatttggagcgtcacgggctagttccgcccgggactagttcggggcgtgacaagcactccttacaaaattttgactaaagtcgaaaccctaactcaaaactcaactcaattgctctctaaaaacgatactggaaagccttacgctccccctctatttatacccgaggtaagcagcttaaagccacgaaccaaactcatactaagagtcctaaacaccttaggaaaccctctagtacaagaaagaaactttacataaccaatcgtaccaaatttggactccttccaaattcgactccgcatcccacacgcacacaatacctccatcgtatgccatatagaatctccatcaaccacgtgcatcaactctagcctaagtatcccgcatgatctctgaccaccacggacgtcgtcttatccccaagccgactcccggtccatcaccgcaaatactcttccgaggcatcgagtcacctacacatgaaataaacaaagaaaccatattccgagaccaagctttctccaacttgactcattagtagcaaacaacagtattacatacgtatagtatccatctagaagtcataatcatgaaataatcacggatatccaaacaaacaacctgaaaccgaaactgacacaaagttagccggtcagaccgcgggctgcgtcggtccgaccgcttgatcaccgctggtctgtccggcatacacagcccggtctgaccggtcacataaaatgatagaatcctgcgatcacctgtggatccaatcatctccaaaaccacttcgtgaataaattctaaataacaaaaccaataatctccgatgcccaattgttcatcacagaataataatcaaaaacacctttgattttacaccttccaccttccctctccccccatcctcttctccaaggcagcggtgctgagtccaacgtgctattgtcttagccgtctccaccactactagagatgtcgcctcctaaccagtcttgctatttgcctccaccgccaatgctggcccaccgcctcctaccaactctatagtggcttgccgcttgcccatgtccatagctgaccggagtcggaggataagaagcccatgcatgaatcttggtgcagatccaatggtccaaaatctataaaaattgatccccaattgtttgttgaatgccatttagcatttccgataagaataagacatagtagctagatgccttgagtatctctttttagtttctataggttagcagttttgtgaagagggatctagacatgatcagtcgaacatattcctcaaataattttgagtaaattgtgtttcaatactacagagtacatgtttatttccctttgtggatgccttttacattttcccctttgcagaggatggtaactgcctcctttcccctttggaataggttcagaatgtgcagaaaattctgtatatctcacgcgtgtattacaaaattcgtgatacaacctgaatatgtatataatatgagtatgttttgatattttcctgtatataatttggagatatttgcgaggtagatacaaatttgagattttgtactcatgtgttataagtacatatagggaatcttaacattccttaatttgtttgataatcacccattgcaacgcacaggcatatttgccagtgtgtataaaaataagagaagaaaaaaataggacagcagggggcgtgagggaggatcaggcggcgttcacgtacagataaatataatgtgatttgtttttctttttcaaaagataaatctaatgagatattatctaatggcataagataatggatccacccactttaaactggtaattgatcgatatatattttgtatttgtcttagaatttataagtattttctaattagctgtatactttagatgttacatttaggtatttaaatttcttttcataaattatgctttctaaaataacatacatcatgcgaacagaggtggagggttacgtaggtggacacccatcccttctttctataaagttaattatgacacactaactacaattaaggccctaatgctcaaaccttagtgttctatgtcaccaataaacctattagatcaatgttctccttcttatttgagccatcagattagtttgttgaactaattaggggcctgtgctttataaggcccataatatgtcacgactaatgtcacgcccggaatttctatccaaaattccaaacgcttacatgtgtgtgaaccctcgtccaggaatcagccgaggcacacaataacaaattgataatagagtacaaatattactctaattaataagcgaataaaatgtcattacagaggtagatagttcctctcaatcaataaagttctagcagcggaaaataaataaacggcgcagacggctccactccacaggcagcttgaccaaggctacacctaatcctccacaccatcagcctcattgaagaactcttcctctgatgaatgattgcaaggtgagtatatgacatactcagcaagccacgcagcaaatatgcaagtgcacaggataacaaaggatggcataatagggttgcatttgcaaaagcagcatttagcaaacatttgagaatttaataaaacagttaagtaattaaacaatattaatccaacgctatacaacataccctgttgtataggcccaaccattctgaacaaccaccccggctgcacagttctatctccaaaccaggaatgtaccattccaaaccaggagctaatcaaattattaccagtttaagcatcttttacaatgatgagaggtgtgagactaatcacgaaagacattgttagacccgcccataaccgcgggcacggctattcgaatagttttactctgatcagaggtgtaccactgtacccacaagacacaaccccacatcatgtcaccatgtgcctcaataccaccacggtatctcggaaaggagttgtgacaatacccctcgcataacacaatccactgcagcgcaccttcctggatcataatcacccccttataaaacaaggcatggactccccagcgacccccgtgggcttatctccgccacttctcagtctggtgccccgcaatgaaccatgctatacaaaagataaagccgttgcccatgctggcttgtggttggcacgataaatgtttcacaaccgaaactcgtgaaccggtccttaattgccatgagcacgaccttcaaaaccatgtgctcacaacccaccattaccaggttttagttggcacattaattaattaactaatcacgattgaccatcgtgaactatcaataagccatcatgaaataatagtgagtcattagttatcccataagtgtactaatgtttctaagcagggctaagcaattatatctaatatctagttgaaccaatataaataaagctcaactagtcaaattaatataacccaaggtatcaaggaataaggtaatcaatgtacaaaagggccataacaaagaataggtcaattccacccaatgacattcgaaaatagatgcaatagttgaatagaaacaatagctttaaataggatcaacatgctcaaagggttgtttgggatctgtgtgacttgccttgctggccttggaactcttcaaactcttcttccgcgaaaacggactctccggaaacgacggaatctaagcaaaaagaagcaaaatcaccaaaacagcacataaacaagaatgaacagtacatgtggatatttttaatgtgtagatctcaattttagaaaaatttagagacttgaaccaactaaatcggagctaagatgaattagttatgaatttttaaagattaaaccggattaaaacacttaaatcggtttaaaattgaattatgacgcaataatgaattatttttgaaaaggaaaaggggatttattgcgtcagcggctagggtttgggtggaccgggcgcatgggcggcggttcacgcgaacggacggccgagattgatccgatccaaatcggacggccgagattgatcgggtccacggcggttcacggcggacggccttgatgacgccagcaatgacgtcaccgacggcggcggcggctcggcgaggcagacgactcgagcggcgcacgctcaccggcgaacggcggcgctacggcacgaacggaggacaccaacgggtagcggacggcacggcgaactcaccgacgaccaaagcgacggcggacgaccaacggacggcgacggcgacgaggttgaaacggcggcggtcttcggcttgacgacggcgacgatgctccggtggtctccgacggcagcgaaagagcggacgaggacggcgacgacttggcgacgacgacggcgaccttcccgagcgacggcgacggctggaacgacggcggcgcacggctggagcggcggcggcgaaggcaaagctagggcacacggcgctagggctactccggcgacgagaggcgaaggcgagggtggcggcgagaagagaagagcacggggatccttttaaaggggctcggaggcggcggcggaggcccacggcgacggcaacggcgaaggaaactcgcggcttggagagaggaaagccgatccgattcgaactcgaatccatcgatttccaaaccgatttagccgaagtttccaaaggagaaaaggtagaggagatcccgaagatcatttcccctctatcaattcagccggaaacggaaaggagcggccggattggaaagcggcggcgacggcagctcggcggcgcgaaactagggtttcggcccgaggaggacgacgggcctgacaggtgggatgtcgcgaccgggaaaattgccttttcccgaacgctagtgtattaatccccgtcccaggaaaagccggggtacaccatacaaacatgatataaaagacacatctttattatatcgataatatttacattattacaaaggcacttaaggcctgacaatcaaaaataaacagcagcggactagcggcctacggctccatcttcacaggcgctcaactggggtataagccaggactccacctaagacatcttctccaaagcttctcttactgaagaggggaaagattgagcaagaatgagtacaaccacagtactcagcaagccacaccggcagatgcatgattaatgcaaggggggtacaaggggataataataggggttaggttttgcagtaaacagcatttaaaagtcacttagttgcccaaagttattttataaagacgatcctagagctacacaatattattaatcaaggccgtggacccacacgaacctgccttaacccaaggcctacgatgattcagaccgaactggcaacccaacctgggtcccagctcgtcccaagccaacccaggccaaccattccatattttagttgttgagcaaattttaagaattaaaacactgacttgggtacattgctaggcttgcccatatccgagggctcggctattcgaatagatttactctgatcagaggtgtacatctttacccacaagacacatctttactccgcattccatggccttggaacccgtcgtaaagatgtgacataacccttcacccatcctagccgtgaacaaaagtaccgacccaaccctgcctacggccggtatcccgggacaggcaggccagggttgagcccctagcaacaagatctagaccgggtgcgccacacacataggggtgagaccacccgcgtactagtccagtgccatggcatctcgactaacgggcaccgacccgtgtagtcttcatttgcctagacatctcgattaccgagccgcagctcgcgtagccttcatttgcctcagagatatccatcgtcgcaacgacttcatccatctctatccgtgtccttttgttcaggactagactgagcaccgagttaagccttacccattagacatgtggttagtacggtagtgctttgcaacagaggcccgagcttaatccttatagtggccggggtgctacttcccacaactggcatgcacccaaactccaccgaaaacaggttttaggggttttgaaagaggaagagaggtgtatgtccaattccaccataatccaacaattccatagtgtccaaatgatatgagaattcccaaagtctaaagttataaaaccacctaatgttgcctaattaatcagcgaagcatctacctaaatttatactagtggaaccatgaatagagtacccactagttggggttttgtttattctagggtgaacaaggtaataatatcaatagcaataataataaggtcataacaaaggtaaataggtatggctagataaaacagtgataacgcgggaatttaaataaagcgataatgcaataatttaaatcaacataattttacaaactgggattcaatatgttcaaggatgatgtgacttgccttgctcgctttcccaaacgccggcttcaacttccacgaagagcggatcttccgaagctgcagcgtctacacgaccaacggaaaagaaacggcttttactctaataaactccatacaacaagcaggaacaaagcacaaaaatgggttcttgacttcttaaggaaaaattagagacttgaacggtccaattccgagttcaaatggccaagttatggccatttgaagtttatatgctctttaaatggatatttgcgaatttcttcatttaaattttaattaaaaaatcgggtttattgcgtcagccgagggagagggcacgcggaccgggtccacgggagtggggcccacgcgtcagcctctcggtccacggtggaccgggagcacgcggctggcggcggccggcgccgtgggtcccacgcgtcagccgcacccgcgggcgcgggcggctgacggccgggcccacttggcagccgcgagggcgcgcccgagggcggcctcgccggcgcggccgacgggagcggcgcgcccgcgccccgatggtcaccgccggcgaccaccggcgcggcggagcggcgcccgagagagaggagggaagggggaaggcgaacggcggtcctcggctcaccccgggacaacgacgacgacgagaacggcggccggagcggaggaagacggcggcgcggctcgggatgacgatggcgacggcgctccgacggtcggcggacggagcggagcggcggacggggtcggcggcaacacggcgaagcggacggaggtgtcgccgagtaaggaggaagtccggagcggcggcggcggcggaacggagctcggcggcgatggcggagagaacggagcacggcgcgagcacgaatccgacggcgagggcgagcggcgagcggcggaaacggaagagcggagctcgggcaacgtttaaatagcgccgggggaaggaaagagcggccggagagggaggaaacgggcgcggagatctcggccgccattgatggcgccggcgaggtttgcgggagcgattccggacgaatccgagggagagagagagggaaaaacggggggaaagagagagggaatcgcggggaatgattcccccctcattatggcgcgcggggacggcgggatgcggcggaatccgcggcggcggcggcgctagggcacgggcgagcggcgggagcggcgggaggaaggcgatgacaggtgggccccacccgtcagcgagggcggcgggcgggcccgcctgtcagcggcgcgcgcgcgggggaggtgccgatgggccgcgggggagaggagagagagggagggagagttgggccgagccggcccaagagaggaagggggggaaaagaagacttttagggatttttctttttataaaccttttcaactttgtttatttcttaataattattatttgtgctctgaaaattccactaaaatttgagggctccttttagaccaaggagaatttaacaaaaattctccgggccacatttgaatttttcttgtacgtattttagggtttgccaatttcttttcgaattttaattaattctattattccttttagaagatgatttttatttcgggatgaatttatcagggcgtgacaaatccaccccccttacaagaatctcgtccccgagattcgaggaggctagcaagaagataggttgggcggtcttctcttcttgtctgacttcttccgttgcgtcttgacaaacttccagcaaaactttaccactcggaactgcttggcttgacctcctgttgcggatggaatcttctcttcacctgacttggaccagggtgcaccttttggctgactcagactaggttgcggtagttcagtgatgcttccgttccagaacttctcatgattcatatcttcggagtcaacctcagacaagttaccacttcacgtcaggcgtcaacactagcttgtcattactaggatactatgtttgtcatcataagaatatcatgcttgtcattcacttctaacttgccatcaactgtctcatattagctttcctggtctccggtgctaggtacttcggctattcgatgcaagggtcaaccactctaactataagttatacttcccaagagaaccaatttatcccgcttgacatgctttgacgtcttcccgaatgacgttgctgctggacttgttattgtctgatcgtgatcctgccagatctgaagcttcgttgttagaggtgattttaatctgacctttgtagactatcttcgaacatatcactggttctataactgggaatggctctcacgaacaagcagctcggattcactttctttacattcagtttacttcccattattatcttcaggttgtcctcagttagcattcaacgtattcctttacacctttaaacttgacgtgttctttcccattggatcatctcccaggacatggcgttgcctggtaaccggtgcttgcatttttcactccgtgtagcatctgataccgagtggaagatttcactctttgccttcatagaaacacttttacctaggtcatcttgcttacttaatgacaaggtgactgttgcggggcaattacactcaggggtcttccgtgagcgatgcagagcatgtttctgtttatcaatcacctttcggcctacttctttcatgctagagaacatctttgccaatctcttttatcaatcttctttcggcttatctctaacaggtggtattctttaatgtggattgcggacgcttctggggatgatgaggtcctttggcttgctgcctttcagtgaaaccttgatgtggttcgtcaaaagctgcactgactaccttcagggaaatacattgcctgctatctgtatctataccactagggtttaattgccatcagccgatggtcatctttagtgcttcctcgagatggggagcatccaaattgttcttctgccacatcacctttgacctttttctgataccagataaactaattaccaaccatcgactattatgttctcaaatattgatgtctcctggatcttcttaactgttggcaggtatatccgatcttatcaatgtagaggcatggcgggtacccttaggggtttcctccaacaatccttatcttgatctgtaaaaggcgtatccaaactcctatcctcaactactgtctcgttggctttttaacccaacacagtttaattgtttttcttttccatccacaggttggttattaactcggggttagaatatagttcctctgacacgagaccctaggtctcctttgtcagtaaacaattatacacatgatcacatatccgcatctttcaaacgaatcctcatggaacttgtctgtattacacatttctcccttattacatgaattcgaggcactgccttaaacaaaaagggacggtgcttaacatcggtacattgtatcctcaacaggaatcatccataaacatagcaagctcactgttttatagacatgaatatatttttttattacatgattgctgtagactcccggttacagtgataagtagctaactgaaaatcacaaacatggatactcattctgattctggagagatatagctggcgtggttctagtgactgcattatccttgattggttctgtgatgatgtgataggactgcatattgctatcattcacaggagaagcttccttctgattgctggttgaagcggatgacggtcttctgcttggtatcgccctttgcttggcctggagtaggtcggggagagacacaacttcttccatcgacgacaattctttgctggggctgaaagtgagcattgacaccttgtggtaatgcactcgctggagttggagctgttgcaacgcgagccataggactgctttgggatgcatggatgacaattcgctgaggagcaagcttctgattgcagggatttgcgtggactgaaatgctggcagctacgtttctcggttttgggcacttgtcggcgaaatgacccattccttgacaattgaagcaacagatatcttcccggactcggcattttcttttctcatgttgattcctctgtcctggcactggagttaggctgaaactggaatcttggcgaggatttgtgtttccttgatgcttccctccgttggaactggcgggttggttggccatcttcttcgtcagcagaaaactgaatcgacaatcttttggtacatgatcagttccttcacaaaagaaacaagtgatcctgctcgttggacacctgtcgggtggatggtcttcctcgcaatgaacgcatgtagaggcacacgagctggcaacatgaccgatttctccacaacgagagcatgccttaagttctattttattctggttaaaaccttggggagacttcgcaccttcatcatctgaggagacttgatctgaatcttcactatcagacactctacctccattagctaaaagatgctctgtcaactgttgtgcacctcggaaggaatttcttctctgatgttttgtcattcctggtggaggccattctgtgctggtaatgatcatcttacggacttcatcttcggttcgcattggtgcttttcttttctgctgaggacagttccttgcgtagtgcccttgctcatcacacataaaacagatgatacttgcttcttttgggtcaacctgtggcatggcatgaggggccttctgggatgttggcggtgcgctgacttgtggtgtgagtgctgggactgcctccaactgcacttgaggttgtatttgactcaagttcagaattggcgtctggtgctgctgtagtatctctataagcaatttgttctggttaatcaggtgttggaccactgccacacaactggtgtctggtgcttcattcactcgggagcttgaggtaccaatgtcctgacttctgaccttattgcctttctcattgtcagccatctgttgcaaaggtttggagagggagagagggaaaacaaaggggagagacagattagaaactaaggataggaccttaacagatctaagtcttttgctgttatgatgtatgttaggcttattctgcaagttgattaagcaaacaacctagcatggttacatcacaccccactgatgcaaaccacgcgctacacacacaagcaaggaaacacacgactaacgactctaccctagagggtggcttaggttcagcgacaggttctccaagatcttcactcctgcttcacagctggcttcactgcttcctccacttcactagcagatcctgcagtcttctggagcttcggcaaacaactgacgatgtcctcttcttcactgacctgaccatctagtactagttgaaaatccgaagaaggaagaacggagtaaaccttttgcaaatagcattaggggaaggagaaaaaggaactttcgcaaataatttttatttataaaatatgtccttgggttttatccacttggcttatcctacagtcgagatggctctgataccagcttgtcgcgaccgggaaaattgccttttcccgaacgctagtgtattaatccccgtcccaggaaaagccggggtacaccatacaaacatgatataaaagacacatctttattatatcgataatatttacattattacaaaggcacttaaggcctgacaatcaaaaataaacagcagcggactagcggcctacggctccatcttcacaggcgctcaactggggtataagccaggactccacctaagacatcttctccaaagcttctcttactgaagaggggaaagattgagcaagaatgagtacaaccacagtactcagcaagccacaccggcagatgcatgattaatgcaaggggggtacaaggggataataataggggttaggttttgcagtaaacagcatttaaaagtcacttagttgcccaaagttattttataaagacgatcctagagctacacaatattattaatcaaggccgtggacccacacgaacctgccttaacccaaggcctacgatgattcagaccgaactggcaacccaacctgggtcccagctcgtcccaagccaacccaggccaaccattccatattttagttgttgagcaaattttaagaattaaaacactgacttgggtacattgctaggcttgcccatatccgagggctcggctattcgaatagatttactctgatcagaggtgtacatctttacccacaagacacatctttactccgcattccatggccttggaacccgtcgtaaagatgtgacataacccttcacccatcctagccgtgaacaaaagtaccgacccaaccctgcctacggccggtatcccgggacaggcaggccagggttgagcccctagcaacaagatctagaccgggtgcgccacacacataggggtgagaccacccgcgtactagtccagtgccatggcatctcgactaacgggcaccgacccgtgtagtcttcatttgcctagacatctcgattaccgagccgcagctcgcgtagccttcatttgcctcagagatatccatcgtcgcaacgacttcatccatctctatccgtgtccttttgttcaggactagactgagcaccgagttaagccttacccattagacatgtggttagtacggtagtgctttgcaacagaggcccgagcttaatccttatagtggccggggtgctacttcccacaactggcatgcacccaaactccaccgaaaacaggttttaggggttttgaaagaggaagagaggtgtatgtccaattccaccataatccaacaattccatagtgtccaaatgatatgagaattcccaaagtctaaagttataaaaccacctaatgttgcctaattaatcagcgaagcatctacctaaatttatactagtggaaccatgaatagagtacccactagttggggttttgtttattctagggtgaacaaggtaataatatcaatagcaataataataaggtcataacaaaggtaaataggtatggctagataaaacagtgataacgcgggaatttaaataaagcgataatgcaataatttaaatcaacataattttacaaactgggattcaatatgttcaaggatgatgtgacttgccttgctcgctttcccaaacgccggcttcaacttccacgaagagcggatcttccgaagctgcagcgtctacacgaccaacggaaaagaaacggcttttactctaataaactccatacaacaagcaggaacaaagcacaaaaatgggttcttgacttcttaaggaaaaattagagacttgaacggtccaattccgagttcaaatggccaagttatggccatttgaagtttatatgctctttaaatggatatttgcgaatttcttcatttaaattttaattaaaaaatcgggtttattgcgtcagccgagggagagggcgcgcggaccgggtccacgggagtggggcccacgcgtcagcctctcggtccacggtggaccgggagcacgcggctggcggcggccggcgccgtgggtcccacgcgtcagccgcacccgcgggcgcgggcggctgacggccgggcccacttggcagccgcgagggcgcgcccgagggcggcctcgccggcgcggccgacgggagcggcgcgcccgcgccccgatggtcaccgccggcgaccaccggcgcggcggagcggcgcccgagagagaggagggaagggggaaggcgaacggcggtcctcggctcaccccgggacaacgacgacgacgagaacggcggccggagcggaggaagacggcggcgcggctcgggatgacgatggcgacggcgctccgacggtcggcggacggagcggagcggcggacggggtcggcggcaacacggcgaagcggacggaggtgtcgccgagtaaggaggaagtccggagcggcggcggcggcggaacggagctcggcggcgatggcggagagaacggagcacggcgcgagcacgaatccgacggcgagggcgagcggcgagcggcggaaacggaagagcggagctcgggcaacgtttaaatagcgccgggggaaggaaagagcggccggagagggaggaaacgggcgcggagatctcggccgccattgatggcgccggcgaggtttgcgggagcgattccggacgaatccgagggagagagagagggaaaaacggggggaaagagagagggaatcgcggggaatgattcccccctcattatggcgcgcggggacggcgggatgcggcggaatccgcggcggcggcggcgctagggcacgggcgagcggcgggagcggcgggaggaaggcgatgacaggtgggccccacccgtcagcgagggcggcgggcgggcccgcctgtcagcggcgcgcgcgcgggggaggtgccgatgggccgcgggggagaggagagagagggagggagagttgggccgagccggcccaagagaggaagggggggaaaagaagacttttagggatttttctttttataaaccttttcaactttgtttatttcttaataattattatttgtgctctgaaaattccactaaaatttgagggctccttttagaccaaggagaatttaacaaaaattctccgggccacatttgaatttttcttgtacgtattttagggtttgccaatttcttttcgaattttaattaattctattattccttttagaagttgatttttatttcgggatgaatttatcagggcgtgacatgggacccacctgtcagcggctgcgagggcgcgcgcgcgcgcgggcggctgcggactgggccggctgggccgaggagagagaagagaggttttgggccgactttcggcccaaagccaaaagagactttttaaaacctttttcaatttaaattatttcttaaatgcaattccatttattaaaaatacttccttagctcaaataaatcccagaaaaatctaggaattatagaattaagcaaagtatttaatgaaattttatctggcccaattttatattggaatttattaattaaacttagatcttctcttcaagacttttaaaattatttctagaaattccaattaaacaacaatttatatattttgaattttcagggtgtgacaactaacccaaggtagctggtggcaagcaagtcaataggaaaagcgacaccccaccacctccaccaatacataattgatttttttttgacgagaccccctataggtgggccatacttgctcccgcctgcaaaaatcgtttccctaaggcccatttagtggctgcctgcaaaaatacattttcaaaggcaggcctttaagagacctgcctacgagtctgacctccatcctctcttccctctaaacatctttaatttcttccctcaaaaaacatttttcatttttttcaagtcacatgcttatctctttaccttctctctctccactcatttcccctctctctctctccaacttctcccctcctctcccattgctcgggctagcagggacatggctgggggcgacggcctagacgaatggtggtggggagggctcgggtggtgggcttgacgatcggacgtcacggagcggaggatccattggccgcagatccggtctgggcggatccaccggtgataggcaatggcgacggcggaccactctgcctctccatcctccctcccacggcttctaaataacatgagagcttcctaagtgcccaattattataggtctagaaagactagaggcaagccatctaaaaaatgtggcagcacaaatcataaatgttcaacaatgcaatagagaatactacaacaattataaaaatatgaaattatgacctccatgtaattcagcattattttgtgtaatagtatttggaacagcttacagtagcacatacaactaggcatgcatcatgcatgcacatttataaaatgacaactttatttattctataagtaacacctcatggagctctagctctttgcatggctcaggtattacttacttgttggcttcctttctttcatattgagttattaatagaatagcagaatatgttcatgcacgctcagaggaagcagccgaggttaccgagctcagccttgccacacacgctgagcactgcctcaaggaagaggacatcggcggtgacactgaagttaatcttcgcagcctcacataggcaaccagcggcaatggtgcttgagagactgttgattggtggacaacagtcttgcatagccttagtcgggttgttgagcagcgtggacaaatcaagttgtgcgcacacattaagtgcaattacattttctcttgggcattgactaccgccagatggtgttggtggctgcgtgggtgctatggttggtggttggctaggtgctacaactggtggtggagatggtgctataactggtgccggtgttggttctacagacaccgatggtggtgatgctctccttggtgatggtggtgcacgtggtggatttcttcttggaggagtttgaggttgtttggcttgggcaaatgagaagagtgggagaatgacaatggcaagaagatgacaatggaaatacttggctagctcttgttttgaaagttcttcattatctgatgctatttataggcagcatctggttactctgcaattcaatttttgtcatgtacggttccaatttgagtggaaatttctctcacgcgagttaagccaacgaataattatggtcacctttgtaccaatagtacttgccatttgctattttgatggtcaatcaagcacattttcaattgaagaacagtgaactcatggatatttttttttgagaaacacagtacaaacgcagacgctcacaacgtgcgcacgctcacccctatgaacgcacacatgcacaccctacccctatgagcacctccggaagactgggctggcatattttgagattgacgaagttaccacaggtgcctcgctgttgacgggtacgtctggatatttggggtcattctcttgaaacttgaatcgattcagtgctgatgcggctgcattggttgactagctgagatgatgcagagaatatgtgttatctgtcctatgcctccctaattaaactgaatgcacaagtgtagatcagatgctctgtttttttttttggcatagatacttgttgccaacaattaaatccttgtttctttcctttgtcttatcaatgccttcgaatggatgaattggattgaatctctgcaattactactattttactttgaagaaacagttcaaaactgatctggatttatgggtactagtagtcaatgaggcacgagtgatttaccttctacctcagtgaaatcctcttcccgttatatatgacctggcagtgttggatgttttcattagaaacatttcaatatgatcagagcatgtacatatttacggctagctaggaggacatccggtaacaaaagcttttgtgatggtaaaattgaatatatagcatctggaggtcccttttggttttttcaaatgttgtgttaaacaaggccctgtctcacccaaattcagtgaaagaaaaaattgtctagtttacatgaggcagttgattgccgtttgtatagatggctataaggcccaaggaccacgcggcccagcccgaagcacgccattttggcccggcccaagcacggcatggcccgactgggatcgtgcccatgccagcctagcctgacagctgggttgtgcctgggctgcaccctcggcacggtgggctggcccggcacggcctgatcaaataaaaaaaatattggtatgcaaaatagacttaaacaaccatataaagcaaggcccaaagagaagaggaatacataatagacttattttctagccatttgaacacagcccacacagttgagggacgaaaaatagactttttcttggagaagcacgataggccatcgtgtcttcgggctggcccggcacggcccaagttgtattgggccgtgccttggccatgtatgccacccgtaggctggcacggcacggtccggtgtgtcggtcgggccatgccggcccgactagcctcggccctggcatggccgtgccgtgccgggcggcccagttggccatctatagccatttggatgtcaaactcctctcgcattgtctcacgaggatcctttccgcaagctgcagatgagcatccacaggccactgttaaactctattcacgacctccttcaggttgaatgaaacggtgatggttaaactcatccccaagttgagaccatgcaagatggagcttcttcattcctagaacttatgtaacacatgctagtgaaaacctttttttttacccatatttaattgtttggagcaaaattgtttgaattctgtatctattacattatcccaggaagttatgaatagcttctattgcacgaagccgaagactgtcaatttcttcaattattctcttatcctcgacatcagttcctagtatatatttcaattatatagatatatatttcatcaaaactccaggttgatcgaacaatgcatgatgaactgcttcatcaaccgtatcttgaagtatttcaaccatcggcttgggagattgttccttcttggcattgacttcctcttcagacatgttggtacaaaactcgggtcctaccaggcgtgccaacagagtgttgacgaaaaatcggcactcggccgatggtgccagaactgtgttggtgcaaactaagtcgacaaacacaatagcctaggagatttgcttagctccagtgcatgtctaagggtttatgagatgcgggcgtgcctatcagtttgatcatgcaactgacaagatatagaaatagtagattaatgagccgatcggctggcaagccgatgaagtaagtccagccgatgccgatactagacgatagtgaaaggattttgagctatcggctatatgattgatgtagaatctgacacttgatgtaaatagagacaatcgactgatgatgatataatagaataagcaatgatccgaaggttaaagcatacatcggctggaggaccgacgtcatgaaatccaaacgattagataaacagtaaaatctttgttgcgactggctaaatccaatttgtatgtaatccttataagtcgatgcaacatccatataacttattggctgaaacccgatgaaacccttattggcaatcaaaaagcaggctagggattatggttctaaacatgacttagtagatcaaacttaactgatgcagcactaagtaagaaaatatacatctagacatgacttagtaaatcaagccctttgactgattttcagggtggtagataccttagctaatctaatctggtaaagcgatttagccgataccggcattaaccctaaagcgaatctcagccaatataagtaaatcgaactatcaaactagattaactaagatatatgatagataggtgcttatatggacaagatcagagtgttgaagccccagccccactgatgcaaacagccgtgacaagtataaaactcgttgaaaaagtagaaaagtaaaaagggtggcgatgcaccgaatttgtattgattgtggagatggtttacaatgaccctgggtggtgtacatatttatacccatgggtagatactggtccttattggacatgaaagaaactttcctaaagataaaaagaaaacataaagtccttatcggatactaaacacacttccctaaaggaaaaaggaaactaccagactattcctaattaatagataaattgccatgccgcatcctccttgaacttggtaacttctagacaaacttcttttagtagattaattttctaaaccgaatatagcaagaatctgactattggcgacttgataattctcatcggccgattccaggactccgttgacgagactgactctaggctgatgatgacttcggagcttaccaaatttcactgttaatagatcggcttcaaaatgttggttaaattagcaagatgtctagccggcgctttcagttgggccctttgttcttcaattgtccacggcaaatcggcaaacttttgcttttctgctatcatatcttgctgagtttgttccagctgagctaggaggtcatcttctttttgttcaagttcttgaatcttctgttgggttgatcttggaccagcaagcagttcatcaagtttggctttgtcttcaaggatttgttgtcgaatggcttcaacaattgtggatgttgtggttgtgatgttgcagtgttgtgatttggataatgacgtctaaacctaaaatccaccctataagtatatatattatgtaacctctgatctcaggagcgccaggactcccctcgctgctggctcgaggtagggttggtgtgcttgggtgcaatggaggttcgtagtccttctagcaggagtcgcaatgcgagagtgactgaaaagccgggctgtgacaaagcccatgtgttgggtgcgttacggagtgcgagattgaaagcatatatccactgcagtgtgagtaaactaatctattcgaatagtcgtgctagcagttaatgagcaccgggaattgtagtattcttgactagactcatagatctttaatattgcttagattaggaaaggacgtgtgtgagatcttgcccgatgggtggagagatcattatgattttggaaatatggacaatttggatgcgagggtaacacgtaccaagcgagacttgggccacattggtaagccctcgatgtttaatgataacttcaacacaactttgtttttattcaaaactgctaggtcatacgtttatgcaaccagaccaagccaacaatgtgcccctataattattatatgcattaccatagtggtgacgtgctgagtatggttggtactcacccttgcaaattttacactcttttagacttagtcgatgtggagataccacatgagaacattcccgaggagggagaacccgaggagatgccttaggaactgatccccagtcgatacctgtggagtatagttggaccgtcgcagcttcgcttccgctaccatatcacgtcctttagtttttcatattgtatcggactagacttggtctatttgggacccactcgggcttcccatgtaataatacgtatcgtaagactatgtgatgcagactatgttgtaccagattgttaacgaccaaatttggtaatatcagtatcggagataaagatgggatcgaagcggaatcgaagatgaggattgttgcagaaacagagtaaggatcggctggagtccggatcggctacgactgagatcggctcagcctgagttggactggttaagtgatacagccgattccagcaatacgacccgtgtacgacattgggttgagttgatgtgcttcaagataattgccacacaaggatagagtcctgggaaggcaattgtatctattaattaggatattttatgtaaattccttagagataaatatgggcaaaagtctgccgcaaagacttatggtatcttagagtttgttagagataagagtcgtgtccaatatggacatatcttgtaattctcgagtataaatagaccccgagccctatgtaatggttaacacacatgttcaatacaatttcggcgcatcaccaccttttttgttttagttttatttcgacgagttcttgctatcgggttgagctgcatcggtttcgatcttcaacaagaggtaaaacttgttatggcggcttgtgttctcgagattagtgcttccatctttatgatactctaactttgtttatgtaatccatcaagttatcatatatcttgcataatgttcgacaatatcgtcatctaacttacaatcagctaacatctgctaccagaagacagccgattaggttaaataacgacgttggcttagactatatgagatatccaccaccctatgaaacatccagcggcttgatcgtctagatattgttcttcttttcatacttaatgttgaatcagttgagtttgatctattaagtcgtgcttagaatttcaatctctagcctgcttactggttgccgattagggtagtgtcggagtttcagccgatcttatctgatctaattgctctcgctctatatgctcaaataatatgctagatctgcccttcatgttaagatcttgtggcatttaagtatattagatctctgtttatgtcgcgaccgggaaaattgccttttcccgaacgctagtgtattaatccccgtcccaggaaaagccggggtacaccacacaaacatgatataaaagacacatctttattacatcgatagtatttacattattacaaaggcgctccaggcctgacaatcaaaaataaacagcagcggactagcgggcctacggctccatcttcacaggcgctcaactggggtataagccaggactccacctaagacatcttctccaaagcttctcttactgaagaggggaaggattgagcaagaatgagtacaaccacagtactcagcaagccacaccggagatgcataattaatgcaagggaggtacaagggaataataatatagggattaagttttgcagtaaacagcatttaaaagtcacttagttgcccaaagccattttgtaaagacgatcctagagctacacagtattattaaacaaggccgtgaaccctcacgaacctgccttaacccaaggcctacgatgatttggaccgaactggcaacccgacctgggttccagctcgtcccaagccaacccaggccaaccattccacattttagtgttgagcaaattttaagaattagaacactgacttgggtacattgctcggcttgcccatatccgagggctcggctattcgaatagatttactctgatcagaggtgtacatctttacccacaagacacatcttcctcacgtgttgccacgtgccacataccaccacggtatacggacggaagacgtgacatagtttccaacccatcctagccttagacaagagtaccgacccaatcctacctacggccgggatacccgggacaggcaggcagaactgagcccctagcattgggcaccaaccctccgccgtatgacatctcgactaccgggccgcagctcgtgtagccttcatttgccctggagaatgtccatcgacgcccgacttcatccatctccaatccgtgtacttttgtttatgactagactgagccacaaactaagccttacccattagacatgtggaagtacggtagtgctttgcaacagaggcccgagcttaatccttatagtggccggggtgctacttcccataactggcatgcacccaaaccccaccgaaaacaggttttaggggttttgaaagagaaagagaggtgtatgtccaattccaccataatccaaccattccatggtgtccaaaagatatgagaactcccaaagtctaaaattataaaaccacctaatgttgcctaattaaattgcgaagcatctacctaaatttaaactagtggaaccataaatagagtgtccactagatggggttttgtttaatctagggtgaacaaggtaataataataacaataacaataataatatggtcgtaacaaaggtaaataggcatggctaaataaaacagtgataacgcgggaatttaaataaagcgataatgcaataatttaaatcaacataattttacaaactgggattcaatatgctcaaggatgatgtgacttgccttgctcgctttcccaaacaccggcttcaacttccacgaagagcggatcttccgaagctgcagcgtctacacgaccgacggaaaagaaaaggcttttactctaataaactccaaataacagcataaacaaagcacaaaaatgggttctttacttcttaaggaaaaattagagacttgaacggtccaattccgagttcaaacggccaagatatggccatttgaagtttatatgctctttaaatggatatttgcgaatttcttcatttaattttcaattaaaaaaatcggattattgcgtcagccgaggggcgggcgcgcggaccgggtccacgggaagtggggcccacgcgtcagccgctcggtccacggtggaccgggcgcacgcggctggcggcggtcggcgccgtgggtcccgcgcgtcagccgcacccgcgggcgcgggcggctgacggccgggcccacttggcagccgcgagggcgcgcccgagggcggcctcgccggcgcggccgacaggaggagcgcgcccgcgcccccgaattgcccgccggcgaccaacggcgcggcggagcggcacccaagagagaggagggaagggggatacgaacggagcggtccacggctcaccccaagacggcgaaggcggtggaaacggcggacggagcggaggaagacggcggcgcggctcgggatgacgatgacgacggtgctccggcggtcgacgggcgaagcggagcggcggacgggatcgacggcgtcgcggcgaagcggacggaggggtcgccgagtaaggaggaagtccggagcggcggcggcggcggaacggagctcggcggcgatggcggagagggaggagcacggcgcgagcacgatttcgacggcgagagtgagcggcgagcggcggaaacgaaagagcggagctcgggcaacgtttttatagcgtcggaagggagagaaggcggccggggaggaaggaaaccggccgcggagatttcggccgccattgattgcgccggcgatgattacgggcttgattcgaacgaatccgagggagagagagaggggaaagagggggaaacgggggaggggaacgcggggattaattcccccctcttgattgcacgcggggtggacgggagcggcgggattcgcggcggcggcggcgctagggcacggacgcggcggcgggcgcggcgcggggttggggatgacaggtgggccccacccgtcagcgagagcggcgggcgggcccgcctgtcagcggcgcgcgcacgggggaggccgatgggccgcgggggaggagagagagagagagggagagggagggaatgggccgagccggcccaagagggaaaaaagggggggaaacagacttcttttaggattttctttttataaaaccttttcactttgtttatttcttttcaattattatttgtgctctgaaaattccactaaaatttgagggctccttttagaccaaggagaatttaacaaaaattctccgggtcacatttgaatttttcttgtacgtattttaatgtttgccaatttcttttcgaattttaattaattctattattccttttagaagatgatttttattttgggatgaatttatcaggacgtgacaaatccaccccccttacaagaatctcgtccccgagattcgaggaggctagcaagaggataggttgggcggtcttctcttcttgtctgacttcttccgttgcgtcttgacgaacttccagcaaaactttaccactcggaactgcttggcttgacctcctgttgcggatggaatcttctcttcacctgacttggaccagggtgcaccttttggctgactcagactaggttgcggtagttcagtgatgcttccgttccagaacttctcatgattcatatcttcggagtcaacctcggacaagttatcaacttcatgtcatgcgtcaacactagcttgtcattactaggatactatgtttgtcatcataagaatatcatgcttgttattcacttctaacttgccatcaactgtctcatattagctttcctggtctccggtgctaggtacttcggctattcgatgcaagggtcaaccactctaactataagttatgcttcccaagagaaccaatttatcccacttgacatacttcgacgtcttctccaatggctttattgctggatttgttattgtctaatcattatcctgccaaatctgaggcttcgctgttacatgtgattttaaactgacctctgcagactatcttcgaacatatcacttggttcataactgggaatagctcccacgaacaagcaactcagattcactttctttatgttcagtttactttccgctattctcttcatgttgtcatcagttagcactcaacgtattcctttacacctttaaccttgatgagttctttcccgttggatcatctcccaggacgtggcgtcgcctggtaaccggtgcttgcatttttcactccgtgtagcatctgataccgagtggaagatttcactctttgccttcatagaaacacttttacctaggtcatcttgctgacttaatgacaaggtgactgttgcggggcaattacaatcaggggtcttccttgagcgatgcagagcatgtttctgtttatcaatcacctttcggcctacttctttcatgctagagaacatctttgccaatctctttttatcaatcatctttcggcttatctctaacaggtggtattctttaatgtggattgcggacgcttctggggacgatgaggtcctttggcttgctgcctttcagtgaaaccttgatgtggttcgtcaaaaagctgcactgactaccttcagggaaatacattgcttgctatctgtatctatgccactagggtttagtgcttcctcgagatggggagcatccatattgttcttctgccatatcacctttgacccttttctgatacctgatcgactaattaccaaccatcgactattatgttctagaatattgatgtctcctggatcttcttaactgtttgcaggtatatccgaacctttcaatgtagaggcatggcgggtacacttatgggtttcattcaacaatccttatcttgatctgtaacaggcgtatccaaactcctgttccccaactactgtctcattggctttttaacccaacacagtttaattggttttcttttccatcaacaggttggttattaactcgaggttagaacatagttcctttgaaatgagaccctaggtctcctttatcagtaagcaattatacacataatcacatattcgcatcttccaaaagaatcctcatggaacttgtctgtattacacatttctccctcattacatgaatacgaggcactgccttaaacaaaaagggacggtgcttaacatcggtacattgtatcctcaacatgaatcatccataagcatagcaagctcactgtttatagacatgaatatatttatgtattgcattattgctgcaaactttcgattacaccatgataagtagcgaactgaaaaccacaaacatggctgctcattttgattccggagagatatagctggcattgttctagtgactgcatccttgattggttctgtgatgatgtgataggactgcataatgctatcattcacaggagaagcttccttctgattgctggttgaagcggatgacggtcttctgctgggtatcgccctccggaggttgattgcccttggctcggcctggagtaggtcggggagagacacaacttcttccatctacgacaattctttgctgaggctgtcgatgcagagaatggttgctatgatttattgccgagtcaggtgcagcaggaggagcattggtgcattgtttctgctatgggttctgattatcacgaggccttacgggtacggcgtttgctccagtgaccacaatacgattggaatgtctgcttcgtgtaaattggcggtaatgtggaggtcgattttgccttggttggggacagttttcggagtaatgcccttcttcactgcagttgtaacaaacaataactttcttacactcgggttcttcatcttgtacttgatttctcagctgctgtattggaacttccaaaggtacaacgcagatactggcctctgtcttgtcagctggtggctggggctgaaattgagcattgacaccttgtggtagtgcattcattggaattggagctgttgcaacgcgggctataggactgcttcgggatgcatggatgacaattcgttgaggagcaagcttctgattgcagggagttgcgtggactgtcgtgccggcagctatgtttctcggttttgggcacttgtcggcgaaatgacccattccttgacaattgaagcaacagatgtcttcccggactcggcattttcttttctcatttcgattcctctgtcctggcactggagttaggctggaactgtaatcttggcgaggattggtgttgccttgatgcttctctccgttggaactggcgggttggttagccatcttcttcgtcagcagaaaactgaattgacaatcttttggtacatgatcagttccttcacaaaagaaacaagtgatcctgctcgttggacacctgtcgggtggatggtcttcctcgcaatgaacgcatatagtggcacatgagctggcgacatgaccgatttctccacaacgagagcatgccttacgttccatttcatcttcatcatctgaggagacttgatctgaatcttcactatcagacactctacctccattagctaaaagatgttctgtcaactgtggtgcacctcggaaggtatttcttctctgacgtctggtcattcctggtggaggccattctgtgctggtaatgatcatcttacggacttcatcttcggttcgcattggtgcttttcttttctgctgaggacagttccttgcgtagtgcccttgctcatcacacataaaacagatgatacttgcttcttttgggtcaacatgtggcatggcatgaggggccttctgggatgttggcggtgcgctgacttgtggtgtgagtgcttggactgcctccaactgtacttgaggttgcatccgactcgggttcaaaattggcatccgatgctgctgtagtatctctataagcaatttgttctggttaatcaggtgttggaccactgctacacaactggtgtctggtgcttcattcactcgggagcttgaggtaccaatgtcctgacttctgaccttattgcccttctcattgtcagccatctgttgcaaaggtttggagagggagagagggaaaacaaaggggagagacagattagaaactaaggataggaccttaaaggaactaactcttcttgctgatgtgttgtttgtttcacttattctgcaagttgattaagcaaacaacctagcatggttacatcacaccccactgatgcaaaccacgcgctacacacacaaacaaggaaacacacgactaacgactctaccctagagggcggcttaggttctgcgacgggttctccaagatcttcactcctgcttctcagctggcttcactgcttcctccacttcgctagcggatcctgcagtcttctggagcttcggcaaacaattgacgacatcttcttcttcgcaaacctgaccatctagtactagttgaaatctgaagaaggaagaagggagtaaaccttttgcaaatagcattaggggaaggagaaaaagaggagctttcgcaaatagtttcatttataaaatatgtccttaggttttatccacttggcttatcctacagtcgagatggctctgataccagcttgtcgcgaccgggaaaattgccttttcccgaacgctagtgtattaatccccgtcccaggaaaagccggggtacaccacacaaacatgatataaaagacacatctttattacatcgatagtatttacattattacaaaggcgctccaggcctgacaatcaaaaataaacagcagcggactagcgggcctacggctccatcttcacaggcgctcaactggggtataagccaggactccacctaagacatcttctccaaagcttctcttactgaagaggggaaggattgagcaagaatgagtacaaccacagtactcagcaagccacaccggagatgcataattaatgcaagggaggtacaagggaataataatatagggattaagttttgcagtaaacagcatttaaaagtcacttagttgcccaaagccattttgtaaagacgatcctagagctacacagtattattaaacaaggccgtgaaccctcacgaacctgccttaacccaaggcctacgatgatttggaccgaactggcaacccgacctgggttccagctcgtcccaagccaacccaggccaaccattccacattttagtgttgagcaaattttaagaattagaacactgacttgggtacattgctcggcttgcccatatccgagggctcggctattcgaatagatttactctgatcagaggtgtacatctttacccacaagacacatcttcctcacgtgttgccacgtgccacataccaccacggtatacggacggaagacgtgacatagtttccaacccatcctagccttagacaagagtaccgacccaatcctacctacggccgggatacccgggacaggcaggcagaactgagcccctagcattgggcaccaaccctccgccgtatgacatctcgactaccgggccgcagctcgtgtagccttcatttgccctggagaatgtccatcgacgcccgacttcatccatctccaatccgtgtacttttgtttatgactagactgagccacaaactaagccttacccattagacatgtggaagtacggtagtgctttgcaacagaggcccgagcttaatccttatagtggccggggtgctacttcccataactggcatgcacccaaaccccaccgaaaacaggttttaggggttttgaaagagaaagagaggtgtatgtccaattccaccataatccaaccattccatggtgtccaaaagatatgagaactcccaaagtctaaaattataaaaccacctaatgttgcctaattaaattgcgaagcatctacctaaatttaaactagtggaaccataaatagagtgtccactagatggggttttgtttaatctagggtgaacaaggtaataataataacaataacaataataatatggtcgtaacaaaggtaaataggcatggctaaataaaacagtgataacgcgggaatttaaataaagcgataatgcaataatttaaatcaacataattttacaaactgggattcaatatgctcaaggatgatgtgacttgccttgctcgctttcccaaacaccggcttcaacttccacgaagagcggatcttccgaagctgcagcgtctacacgaccgacggaaaagaaaaggcttttactctaataaactccaaataacagcataaacaaagcacaaaaatgggttctttacttcttaaggaaaaattagagacttgaacggtccaattccgagttcaaacggccaagatatggccatttgaagtttatatgctctttaaatggatatttgcgaatttcttcatttaattttcaattaaaaaaatcggattattgcgtcagccgaggggcgggcgcgcggaccgggtccacgggaagtggggcccacgcgtcagccgctcggtccacggtggaccgggcgcacgcggctggcggcggtcggcgccgtgggtcccgcgcgtcagccgcacccgcgggcgcgggcggctgacggccgggcccacttggcagccgcgagggcgcgcccgagggcggcctcgccggcgcggccgacgggaggagcgcgcccgcgccccgatggtcgccgccggcgaccaacggcgcggcggagcggcacccaagagagaggagggaagggggaaacgaacggagcggtccacggctcaccccaagacggcgaaggcggtggaaacggcggacggagcggaggaagacggcggcgcggctcgggatgacgatgacgacggtgctccggcggtcgacgggcgaagcggagcggcggacgggatcgacggcgtcgcggcgaagcggacggaggggtcgccgagtaaggaggaagtccggagcggcggcggcggcggaacggagctcggcggcgatggcggagagggaggagcacggcgcgagcacgatttcgacggcgagagtgagcggcgagcggcggaaacgaaagagcggagctcgggcaacgtttttatagcgtcggaagggagagaaggcggccggggaggaaggaaaccggccgcggagatttcggccgccattgattgcgccggcgatgattacgggcttgattcgaacgaatccgagggagagagagaggggaaagagggggaaacgggggaggggaacgcggggattaattcccccctcttgattgcacgcggggtggacgggagcggcgggattcgcggcggcggcggcgctagggcacggacgcggcggcgggcgcggcgcggggttggggatgacaggtgggccccacccgtcagcgagagcggcgggcgggcccgcctgtcagcggcgcgcgcacgggggaggccgatgggccgcgggggaggagagagagagagagggagagggagggaatgggccgagccggcccaagagggaaaaaagggggggaaacagacttcttttaggattttctttttataaaaccttttcactttgtttatttcttttcaattattatttgtgctctgaaaattccactaaaatttgagggctccttttagaccaaggagaatttaacaaaaattctccgggtcacatttgaatttttcttgtacgtattttaatgtttgccaatttcttttcgaattttaattaattctattattccttttagaagatgatttttattttgggatgaatttatcaggacgtgacagtttagtatattctatttgctttaatatcttaatataaagtagtgtcggagtattagccgataaatgccagatctatttgatcagctatgctatgaatatgtataatcttattattaatatatatttcaacctaagtgatttatactgtctcggcaaggtgaccaatctatcccaatcacttggtttaagtatatgtcggtataaggattatatatcattgatatctatagccgatcgggtagatttagttccgacttgtttccttaacaattgtcgatcgattcacatatgacatcggctcaaagataaatgatatgtcatcagcatctagccgatcggctatcatttatggatttaatcacggtttctttgtctttgtttcttgttgattgcaggatcaaatcaactagcacgctcatacatccgaaggcgagttttggagctgcactggagttaagcagatctcccaggcctcgtgttttccatcaacacagatatgtttatatatgtgtatgccaacctaccgatcgaggcagttggtattgtgaagacatgtggatccctgtgttataaaaccgggtcccgacacatgctcaccggtgatactaggtgatgctatgatggccatttaggcaattagaccgaggacgaaaagtcagagagacgagcccagtgcatcgcctacccgtggctgcatgagtaacccaagcaaagaagcttcacaaagaaggcgagccatcgctggtcttttgatatgatgctaatggacaagttgatgcttaattatgcacttgatcttacacaccacgtggttggggggagggttctgtggcccaatgggaggtgctgggcccaccccggcactccagtagatgcgcttgccttacctcatctcacccaccatccctctccctggacaacgacttgaggatgttcttcaccgttgccagagttagcctagatatgcccctatgcatctaccagatctacatgtgaaggggcatgaggaagcagataactaaggtgacgttgcatcctttcgccatagctcgaggtctagcatgatgataaagtcactattctagggatcagagttggcggcatgttctttaatttgggggggagaatggtgtccactaggttgatcatgaggactgctcttgacatgtggtcatcgtcgtgcccatcagttactctctagcgagaagttgagcagcttctttgatgttgtgtgcattatgtcttcgccgcacggttcaggcacatggctggtcacccaagcatcatgatgctcgtgcagcagcgtgtgcaccatgcctgttagtatttgaatagttacagataaaatccgcaagcgcatggatataccaatgtagcacttcccctacggagtattccaagggtatcgaatccaagggaacatgtgtgatgagaggttcctttggttcatccaaggacaccaagcaaatgatagtccaggatagagaggattcacaagctcgctaggtccatctggcctggcctttggcccatgtcctcccctggttctcctttatccattttttggtattttgggctaatttattgatgtttcgatgaagttcacagcccatccttgtatggatacagaattctcctcactttagtctagatttcctcccaacatcagagtttatcatctgcatacaaatatatatcaacacttgtgaaatacgtgagattaagcacctatcactatgttggatgttttattgtctgatctttatgcagatgttggtggtatagaatcggcatttaagagccgccaacaatgctgtggttggttacttgtaagaagccctactactccaacgctgcacacatgatgtcttcatggcacagctttgccaattcaccagcgtccaagatgtccaagttaatgatagggagatcgcacttacttccatttctttttcctggaaacaaggtggcacatctacagctcgatttgaggaggtagatgtcacgcccagaaattcacgagccaaaatttctaagctggatgtgcattaaacccctatccaggaccagccagggtacacacacgacaattgttgacatacagatccacgtcttacaaaaaatataaaagattacaaatgcagcggaaaagataaaagtgagctaaacctgaagacttgactcctgtagcgggcgattccattccacaggcatccttgacggcagcgacgaaaccaacttcttcgagacatctccaattgagaaggatttcaactctggagtggggtaaaagacagcaagactgaatactaccccctgtactcagcaagtcataccggaagagaaggtatgatgcaggatatatccaagggaggcaaaaaggttcttttgcataaagctagcatttaaaagcagtagttgaaagcagtaaaacagttgcagtaattaatcaatattaaccaatcactgtccaatgctacgccacgttggagagaagttcactcctgaacagaagaaagacttcaatgcaatgatgcagcaaacacgagatcaatttttaagttcattcatgcaaactcgcaagggcacatttgttcagaagtacaagctgaaggtggttcctgaggattttgggatcggttcttctaaagagggagaaaagaaacaagttctagacgaatcagcccagccgagtaacaaaggtgctactgatggctctccaggagatcaaggcgacaaccctcaaggggtccatggggttcaaggtaacggcactcagggaccgcaagggggaaatcttaatcagaataacaatgcattccaagattttttcaataactttcaagatcgagttgactatgctgtgtataatgctttgattaattaatctggagtgttgactaataccttgtcaaatatgatgaaatcggtagccgatggctcaatagctgaacatcaagctacaggcccagtttacttgcaagggggtatttttccaaattatcgaactttgatcaccgatgttcatccacttactcagggagttcatcctgttgcatcatcagctcagccgacggcgccagcatcagctccagcacctgcagcgccgtcgtcggctccaggccaattaatcaatcctcaattattggtgagagagcaatcacagtaccctggaccgaatgtgattcaactaacaaaagaccaggttgtatctatgtttctacctcctcagaatgctattaattcggctcagcagcagccgattcagcaaacaccgtccaggcaacaggttgtgcagcctattcaacaagcatccccaattcagcaggctgtgcaaccagttcagcagacaccagcaaagtaaccggctttacagccgattcagcggacatcgttgagacagcaggtcattcagccgactcagcagcaagcctcaatgaatgcatcggctgggtttgcaatgcctggtggccagcctgtgcagtacactgcaaatcaggtggtctcggaacacttggttcatcatatgcaaccagatggttcggtggtgcctcaagttattcctgagcatttggcgcgtggtattcagccgaaccttcacaattaacaggggggcaatttgagttatcagtatcagcctccatcgccccaagttcagtaccaacaggcagtatcggtgccgcctcaattctacaaccagttggagcctacaccacaacaaacacctcagcagcgaccatgggccaatgtgatagctgatgtaatgagggagcaatttgggcttaaaccaaaagagactgggaatttgtaccgacaaccttatcctgaatggtttgaaagggttcctttacctaaccggtttaaaataccagacttctcaaagttctctggacaggatactacatcaacctatgagcacatctgccgattcttagctcagtgtggtgaggcatcggctgtagatgctttgagggttaggttattccggttgtcattagctgggttggtttttacttggttttcttctctgccatgtgggtcgattaacagttgggccgatttagaaaagcagtttcacagttatttctatagtggggtccatgagatgaagctgtctgatcttacgtcaatcaagcaaaagcatgatgagccagtgcaagagtatattcaaaggttcagggaaatgaggaataaatgttacagcttgagtttgaccgatgcccagctagccgatttggcgtttcaagggatgattgctccgatcagggaaaaattctcatatgaagatttcgaaagtttgtcgcatcttacacagaaggtagctttgcatgaacaaaggttcacggatgctaggaggaactctaggaagatcaatcatgtctatccttatatgtatggatcggatgatgaggatgatgattccgaaatagctgcagccgagtgggtcaggagcaaaaaggttataccatgccaatgggtgaagagctcaggaaaagaggaaaggtatgactttgacataactaaggctgataagatatttgatttgctacttcaagaaaaatagattcaacttcctgccggacatgcaattccatcggctgaagagttgggcaagaagaggtattgtaagtggcataattctgggtctcatacgactaatgactgcaaggtcttcaggcaacaaatccaaacggctattgagggaggaaaaatcaagtttgatgattcgaagaaaccaatgaaggtcaatggtaatcgttttcctattaatatggtacatacagccgatagggtctgtgcaaagggttttcaagtgaattcggctaagatgatcaacaaatatcaaagtaagtatgacaagcagcaggagaagcgttatgaagaacacgatgatggttttgatcctcattggggttgtgagttctttagattctgctggaatgaagggataaggttaccgtccatcgaaaactgccctgggtgcagtgatatcattgagagctcaagccagtcatataataggaataatcgactgaggcaggaaagagtgtctgttcatcaaagattgggccccgtgaatcaaggtcgtggtcagaaggatgaggtagttaggacaaatcaatggtgtccttctggtattttcacaaagaaccagaagagaagggttcaaaggttgagaaacagggagcagcttcaagaagttgaacaagaaattaaccatcggctaaagaaagcaaagccaagacatgaatggcgtattaagaaccaggttcctgtagccgatgatgatgcagccgaagaggcaaaaaggttggcaaaagggaagagtgttgtaacagcaccagttaacatggtctttacattgccagccgaattcgggattgatcaagccgatatagatcaaatagaagaggaatcgactaagttggttttgtcaccggagcgagcaatgttcgagaagcctgaggggatagagaatcggcatcttaaaccattgtatataaacggttatgtcaatgggaagccgatgtctaagatgatggtcgatggtggggctgcagtaaacttgatgccttatgctacattcaggaaattgggtaggaatgccgaagacctcatcaagacgaacatggtacttaaggactttggtggcaatccatcagaatccaaaggggttttgaacatggagctgacagtcggcagtaaaacaatccctacaacattctttgtcatcgatgggaagggttcttatagcttgttgcttggaagagattggattcatgctaattgttgtattccttcaaccatgcatcaatgtttgattcaatggcaaggcgacaagatagagatcgtgccagccgacaggtcagttaatattgctagtgccgatttagctctttgggagatggatggccttgattgtttatctggaaaggtttggaatggagattttttaaaggtatccgattctgatatacagccaattgacgatggagaacccaagctattattttgagggcgtcatggagggttcgaacgtctacaccaaggatacagtagatgatctcgatgacaaaccaggtcaaggttttatgtcggccgatgatctggaggaaattgatataggtctaggtgatcagccaagaccaacatttattagtaaaaatttatgtgcagaattcagaaccaagttgatagagctcttaaaagaatttagagattgctttacttgggaatattatgaaatgccaggactcagccgatcgattgttgaacatcggctacctatcaaacccggggttagaccacatcagcaaccgccaagaagatgcaaagccgatatgctggagcctgttaaggctaagattcaatgcttatatgatgctggttttattcgtccttgccgatatgctgagtggatttctagtatagttcctgttatcaagaaaaacggcaaggtaagggtatgcattgattttagagatttgaataaagctaccccaaaggacgaatatccaatgccagtggccgatcaactggttgacgctgcgtcagggcataagattttgagttttatggatggaaatgctggatacaatcaaatttttatggctgaagaagacattcataagaccacttttaggtgtcctggtgcaattggattatttgagtgggttgtaatgactttcggcttgaaaagtgctggagcaacatatcaaagagctatgaattatatatatcatgatttaatcggctggttggttgaggtctacattgatgatgtggttgttaagtctaaacagatagaggaccatatagccgatttgaggaatgtttttgagagaaccaggaaatatggcttgaagatgaacccgacgaaatgtgcttttggtgtgtcggctggtctgttcttgggatttcttgttcatgagagggggattgagattacccaaagaagtatcgatgcgatcaagaagattaagcctccggaggataaaacagaattgcaagagatgatcggcaagattaatttcgttagaaggtttatttctaatttgtctggtagattagagccttttacgtcattattacgattgaaggccaatcagcaatttacttggggggcagagcagcaaaaagctttggatagtattaaggaatatttgagttctcctccagttttgatttctactcagaaaggagtacctttttggttatatctgttggccggtgagaagtcaattggctcagtcttgatccaagagcttgaaggaaaagaaagggttgtgttttatttaagtcgtagactcttggatgcagagactagatattcttctgtagaaaagttatgtctgtgcctatatttttcatgtacaaggttaaggcattatctgttgtccaatgaatgcactgtcatatgtaaggccgatgtggttaagtacatgttgtcagttccaattttgaaaggaagggttggaaaatggatattttcattaagtgaattcgatcttcggtatgaatcgccgaaggcagtcaaagggcaagctatagccgatttcatagttgactatcgtgatgattcaatcggctcggttgagattgtgccatgggctttattttttgatgggtcggtttgtgctcatggttgtggtatcggcttggttataatttcgcctcggggggcatgctttgagtttgcttatactattaaaccttatgcgacgaataatcaagctgagtatgaggcagttcttaaagggttgcaattgctcaaggaggttgaagccgatgctattgaaattatgggagattctttgttagttatcagtcagttggcaggagaatatgagtgcaagaatgatacgttgatggtttataatgagaagtggcaagaactgatgaagacgtttcggctagtgactttgaagcatgtgtctcgagagcagaatgttgaggccaatgatttagctcaaggggcatcgaggtataagtcgatgatcaaagatgttcaggttgaagttgctgccgtaacggccgatgattggagatatgatgtgcatcagcatttacaaaatccatctcaatcggcttctaggaagttaagatataaggcgttgaagtatgctctattggatgatgagctttattatcgaacgattgatggagtattacttaagtgtttgagcgctgatcaggctaaaattgcaatcggcgaagttcatgaggggatttgtggtactcatcaatcggctcataagatgaagtggttacttcggcgtaaggggtatttttggccgacaatgttagaagattgtttcagatattacaagggttgtcaagattgtcagaaatttggtgcaattcagagagcgccagcgtcggctatgaatcctatcattaaaccatggccattcagaggatggggaattgatatgatcggcatgattaatccaccatcgagtaaaggacataagtttatattagtggcaagtgattatttcaccaaatgggtagaggcgattcctttgaagaaggctgattctggagatgcaatacagtatgtccaagaacatataatctaccgatttggtattcctcagactattacaactgatcaaggttcaatctttgtgtccgatgagtttgttcaatttgctgatagtatgggtatcaaattattgaattcttcaccgtattatgcacaagctaatgggcaagccgaggcatctaacaagagtttgatcaggttgattaaaaggaaaatttctgattatcctcggcagtggcatacccgtttagccgaagcattgtggtcttatcggatggcttgtcatggatcaatccaagttcctccttataagcttgtttatggacatgaagccgttttaccatgggaaattcgaatcggctcaagaagaacagagttgcaaaatgatttaatagccgacgagtactataatcttatggccgatgaacgagaggacttggttcagtcgcgattgcgagcacttgtacaagttactagggataaggaacgtgttgctcggcattataataagaaagtggtaccttataataagatttttcagaagaagaacttgtatggaaattgattttgccgattggtactcgtgatagtaagtttggcaagtggtcgccgaattgggaaggaccgttccaaatccataaggttgtgtctaaaggagcatacatgttgcaaggacttcatggagaagtttttgggcgagcgcttaatggcaagtatttgaagaaatatcacccgagtgtttgggttgacgcgtgatcggctagtattgccgatacatgatagccggtgcgtttgcatcgccttgagatggccgatattgttatatcgcccttagttgttttattgtaatcggttgcggtttttgctgatgtacaatggccgatattgttatatcgcccttagttgttctgatgtattcggttgcagtttgccgatgtacaatggccgatattgttatatcgcccttagttgtttcatatttttatcaatgctcttgacattataaaactagggggacatatatatatctcacaatacagtgcaaaaaattttttttcgctgattacaaaattattgggacaagtattgctggatagccgatatggctctctgcctaatttgttctacttcttctatggcttaggcatcttgagcatcggttccaggaatgaccttcagagatttggtcatatcagtgtcacaccccgaagttttcctcccaagccaaaattgtaatttacaaatgaccccaagaaaatgcagaggaaatcaggataaaaccctaagaaaacaatgcaaacaataatcggatttgacatgtggaatttttcttgagttctacatgtcgaaattcattaacaggatttttagtggaattttcagagctctagaaataatttcaaccaattaaaaatcactaaagtgcaatttttaattccagggaaaatccttttcctttttctttttcttttccctccctttttccctcctttttccttttcggatgggccgccggcccattcccctccttctttccccccctccttgctgggccggccgcaggccgagggcccagcctggcagccgccgcccgcctcctctctcggggtcgccgacaggtggggcccacctgtcgggtccttcccccacctcccgccgatcccggcgcgccgccgcgccgaaaccgccgccgcgcccacgcctccgtccctcccggggccacgtcgaccacgcccgcgcgtgcgccgcattccccgcgcccgttcccctctctctcccgctcgcgcccgcgcccgagatggccgggattcgaaaaccgaatcccgcctctctctcctccccacttcccccacgtcggccgtcgaatcccgccgctcccggccaagtccggttcccccatcccctatttaagcatcgccggcaccccctctcgctttttccccattgcgccgacctctcccgaactccccaacgcctccgcgccgtgcaaccacccgccgccgccgcttttgctactccggccgccgctagccgccgctaggctcgccgccgtctcacgccgtcgccgccgttagcttcgcgcggccgaggtccacctcgtccacccctcctccgtcgaggttcgtcgccggagccctcatctccacgcgcacgggtgagcgccacctctaccgccgccttcggccatggatcccgatcgccatggtccatctctctctctctaatccctctcttctccttccttagggcacgccgaagctcgtccgctagccgacgccgtcctcccgtggcttgccgtcgccgtccgccatcgccttcctccgcgccggccaccctcggtgaggcatcccctcccttcttttcctcttcctctcctcctagagccgctagccgccgcttcgagtcgtcggccgtcgccttcgactgccgccgccgtttcccgtgccgccggtagccgccgtcgtcgcatgcgtgccgtcgccgtttaacccagccggccggtcggctttgatgccgagccgcgccggcggccgcatttatcgccgcccgccgctcctcctctagccgccgctccccgccgccggtcggtcgccttcggtcgccgccttgcgccgctgccgcatgcgcgccgccgccgtgtgagcgccgcgccgccggcgccatggtcgccgctgtctcgcgccgcgcccgcgcgcccccggccgcgaggtccccgtcgccgtccgatctacccttgggtagatcggggccgtcggttcggccgccacgtggcgccgccgcccctcctttccccgtgccactgaccagtgggcccgcgcgccgccacccccctttctctctctcccggtcgctgaccggtgggccccgcatgtcggcgccgcgccccctcgctgacgtcagccctggttgatattgcgcaataaattatttaaggatttcttttatagtaataaacacagtgaatcttctaaaattcataactaattcatccgagctccgtttaatcccattcaagtctcagtaaatcaagaaaaatgtgtagaatccattaaaaatggttttgttctctgtttcagtagccttatagcctgtttgcaatgtttgctttgtatgtcgctagattccgatccctccgacgctccggtgtacttcgagatagtcgccgaggtccctccagcagcagagcaaggcaagtcatgcttgtcacttgaacatgttgatcccattttgcaaatgctctattgttttctttcaaatattgcattgttttataatatcactatgggtgggatacctattgttacagccatgcttttggatatcatgctcctttgttagcttgggttataacatgattagactttggactaggaattgcttagccatgcttagatcaactagcacacattggggatctcatttaaaacctagattataggtttatatgataatgttggtttaataccaccgctctggtgttggttaaataaaatgaaccacatggtgggctgtgggtgcatggttttgctagtcgcacccatggcagttaaggaccggttcgcgggatgccctggaagaatttatcgtacttaccacaagccagcgtgggcaacggctgggcttgtagtgtagctttcctctagtcgacgcatccaggcaagggtgggcgtgatggagcggggcgggccctgcgacggcctctgtcgcttccggattcacctaggcacgagaggggactgcccgtcgcccgctggggacgggggtgaaacctgaggtgtggtgtgcttggctagagggggttatgcgaagggtcctgtcacggcctctttccggtatgtcgtggtggcatgtcggcgcacggaaacgtgtcgtggggctgtgtcttgtgggtacagttgtacacctctgatcagagtaaaactattcgaatagccgtgcccgcggttatgggcggtcaaccagattcaccgtgattagtctcaccctagtgaaatctgttgaattggatagtttaggtggatggttgggcctgtcgcaacgtgggttagcgttggacagcggatgtttaatactgcttaattattacaaccgttttcgcattcaattcctgtttataaatgccagtttttatgcaaatgaaccactctagctcttctttgttaattccctgcatcatacccctattccggtatgacttgctgagtacagtgggtagtactcagtcttgctctacttttcccaaccccagaggacgggtatgtgtcagatgaaggtttccctgaggagtaggcttcgtccgtgccgtcgaggatgcctgtggagtggtgttcccgctgcagttcaagtcaaggcttagctccagtttcttttgttttccgctgcatttctgtaagacctttatgatgtttgtaagacgtggatctgtatgtcaacattgtcgtttgtgtaccccggctggtcctggacgggggttttaatacacattctgcttggaatcctattcgggaatttctgggcgtgacaagttggtatcagagccgaccttgaccgtaggacaagccaaatggaaagacctaagagccctctgaatcctcttcattgcatatgttctttgcaattggattttgttccgggaaaatggggatctgttcttgtggttcaagggaaaaatcttggtcgctcgtttaaagtgagtttttcaaaacgagtcagtctagggttttagtaaaattattgggatttattcgtcagtcagttgggatttgatgggtgaaatgcattcggtcctagctcggtatcatgggttgcaaggtatttatgctttgttcgttattattattatgtatctaatttcccattattttatcgttatgtgagtcttatttattcgcactcatgtaaaatgatctatgcataaaattttgctcttatttgattcctttatttgagtctttattgctttatttaaatttggatttgagcatgcattgatcctactcctttgtcttctctagatggccggtcacccacccaaccaccgcggagaaggcatgattgatttcgtggcagagttggcacgcatgaccctggtggtgggctaccccgacgcgccggagtacacgaccatcccaccgctcagtggcgagcttcctcaccgtgtccgcttggaggtccatggctacgtggggacttgcctcgctaacatggcggttgaggcgtcaggaggcaccgcagatcatgcctgtcaggaggcagcctacttgatgatggccaggttacgggagcgccacgactacatcttccacgacacggcgtaccgctaccacccccgtcgagcccatggtgatggcgtcagctccttccgtccgacagctggcgagaacgacaccaccttcggtcacatgtgtgctgtgatgaggggattggataggatgcactcggacctgcacaaggcgaccaaggccttgaacgatgggaagctcatgaggatcgtcgctctgaaggacgaggtagcgcgcctgaagaaggagaatgctcagttgaagggtcttccagcgccaggaggagtccggatccgcaccacgccccgtaagaggacgactgcacctgtgcgcatccagcttgcgcccaggaacccacctccaccagcagctcccgcagcagctccggttccgcccgcagttcctgcagctccagttccagctcccgcgttcactctctccttcgctccagcatcagccgccagaggttcagccagtggtaccggaggttggctgtctgctactcccagtggcagcggcgagactgatccgtcaggctccaggagtcgctcagagggaccgggtgacgagcaggaggacgccttcgactccaccgaccgcaggagccgttccgagcattaggctcgtttttcccattagtttatcgactgtctagtttttgtttgttagtttgtgtgtttaggttgctcgtttggggtcagtcgacggtcgatatcatgtgcctatgatatggctgtcttaataaggatttttgtttgctctttttaagtgttttaattcagatcagaacaattgcagttttaattcctatataataaagcttagttcttgagcatctgtttttcttcttttccccgtctgctcttccctccagatggtctacaccaggactggcaaccgcacggcaggcgagggcagcaacggcgaagaacgcgctgatggtgtgcaccccaacggtgattctggcaatggtccgccaccacttcccgagaatccgacgcttgcccaagttatggcacatcagactcagatgatggccgccatgatgcagcagatgcagcagcagcaccagcagatgcatcagaggatgatgcagcacgccgaacagcagcaccagcagtttggtccccctccccctcagtccaagttgccggagtttctacgtgtcaggccacccaccttctccagcactaccaaccccatggaggcaaatgactggctccatgcgatagagaagaagctgaatctcctgcagtgcaatgatcaggagaaggtcgctttcgccacacaccagcttcagggtcctgcgtcagcttggtgggacaaccacatggccacccgcccaccgggtactgaagtcacatgggcagagttctgccgtagctttaggaaggcacaggtgccagatggggtcgtggcacaaaagaagagggaattccgggcgctccaccagggcaacaggactgtgacagagtaccttcatgagttcaatcgcctcgcgcgatatgcaccagaggatgtccgcaccgacgccgagaagcaggagaagttcatggcgggtctggatgacgagctgaccaagcaactgatatctggggactacgctgactttgaaaggctggttgacaaggcaatccgtcaggaggatcagcgcaacaaaatggacaggaaaagaaaggcggcgcagttccggtccaaccaaggtagtcagcaccgaccgcgcttcactcccggacagcagggtggacctaccaccatgatcgtccgccagcaccgcccgttcaaccctagcaacttccatcagggcactagtggcagtcagaaccaccatggaggccagcccaaccgcggtgcagctccacgcccaccaatggcaccggcacagtcaggccagcccgcacaagccaagaaggagacgggagcaaaaccagggtcctgcttcaactgtggcgagcttggccacttcgctgacaaatgcccgaagcccaggcgtgccggaccaaggtttatccaggctcgtgtcaaccacgcatctgcggaggaggcacaagcagcaccagaggtcgtactgggtacgtttcctgttaactcaatccctgcaacagtactttttgattctggtgcaacgcattctttcatctccaagaaatttgtcgggatgcatgggttaataagagaggaacttagcacaccgatgcgggttcataccccagggaatagctccacttcggttcaattcagcccttctataacaatagaaattcaaaggtcaccgtttctagccaacctcatccttctcgaatccaaagacctagatgtcattcttgggatggattggctgaccaagtttaagggagtcatcgattgtgcgaatcgcacagtcaccctgaccaatgagaaaggagaaaccgtggtgtacaaatctctagtctcgccaaagaaaggagcctcgttgaatcagattgagacggaaatcccagtggacaccgaagagaagaacttgagaaaattggaggacatacccatagtctgcgagtatccagaggtgttccccgaagacctcaccaccatgccacccaagagggagattgaattccggattgatttggcaccaggaaccgctccaatctataagagaccgtatagaatggcggtcaacgaattagcggaggtcaagaagcaagttgatgaacagctgcagaaagggtacatacgaccaagcacttcaccttggggcgctccggtcatttttgtggagaaaaaggataagacaaagaggatgtgcgtcgattatcgcgcacttaacgaggtcacaatcaagaataaatatcctttgccgcgaatcgacgatttatttgatcaactgaaaggagctaaagtgttctctaagatagacctgcgatcaggctaccaccagttgagaatccgggaagaggatattccgaagacggccttcaccactcggtacgggctatatgagtgtacggttatgtccttcggacttactaacgcacccgcattcttcatgaatctgatgaacaaagtgttcatggaatttctggacaagtttgttgtggtgttcatcgacgacatacttatctactcaaaatccgaggaagaacatgagcaacatctccgtttggtactcgaaaagttgaaggagcaccagctatacgccaagttcagcaagtgtgacttctggttgacggaagtcaaatttctgggccatgtcattacagcccagggtgtagcagttgatccatcgaacgtggagtcggttaccaagtggaccccaccgaagacagtgtcgcagattcgaagttttctaggactggctggttattaccgtcgtttcatcgaaaacttctcaagaatcgcccgacccatgactcagttgcttaagaaagacgagaagtttaaatggacagctgagtgcgacaagaactttgaggagctcaaaaggaaattagtatccgcaccggttttgatcctgcccgaccagacgaaagacttccaagtctattgcgatgcatcccgtcacggacttggatgtgtcctaatgcaagagggcagagtggttgcatatgcctcgcggcagttgcgtccacacgaaggaaattatccaactcatgacttggaattggcagcagtggttcatgctttgaagatctggaggcactatctgattggcaaccgctgcgaagtatatacggaccataagagtctgaaatacatcttcacccaaccagacctaaaccttcgacaacgaagatggttggaactaatcaaagactatgacatgagtattcactaccacccgggtaaagccaatgtggtggcagacgctttaagccggaaaagttactgcactgctctatgcatcgaggacatgtgtgaggaattgcgacaggagcttgaacatctcaacatgggaattgttgaacacgggttcgtagccgctctggaggcacggcctacgctcgtggatcaagttagagccgctcaagtaaatgatccggaaatagcagaactgaaaaagaacatgagagtcggaaaggctcgggatttccttgaggatgagcatggcacaatctggatgggagaaagattgtgtgtaccggacgacaaggaattgaaggatctgatactcaccgaagctcatcagacccagtactccattcatccaggcagcactaaaatgtatcaagacctcaaagagaagttttggtgggtcagcatgaggagagaaatagctgaattcgtcgcactctgcgatgtttgccagcgagtgaaagcagagcaccaaagaccagcaggtttactccaacctcttcaaatcccggaatggaaatgggaggagattggaatggactttataacgggactgccccggacatcatcgggacatgattcaatctgggtagtcgtggaccgactcaccaaggtggctcactttataccagtacataccacctatacgggaaagagattggcagaattgtatctcgcaaggatcatgtgtttgcatggggtacccaagaagatagtatccgaccgaggtagtcagttcacctcaaagttctggcagaagctgcaggaagaattggggacccgtttgaatttcagcacggcctatcacccgcaaactgatggtcagaccgagcgagtcaatcaaatcctggaagatatgttaagagcttgcgctcttgattttggtggagcttgggacaaaagcttaccatatgcggaattctcgtataacaacagctaccaggccagtctacagatggcaccgtttgaagctctatacggccggaagtgccgcacacctcttttctgggatcagacaggcgaacgtcaactgttcggaacggaagtattagcggaagcagaagagaaagtcagaatcatcagggaaaggttgagaattgctcagtctcgacagaagagctacgcggataaccgccgaagggagctcacttttgaggcaggagattacgtgtatcttcgtgtcaccccgctccggggagtacaccgctttcagacaaaaggcaagttggcaccacgcttcgtgggaccatacaaaatcttggaacgaaggggagaagttgcttatcagctagaacttccatccaatatgatcggcatccatgacgtgttccacgtgtcccaattaaagaagtgtttaagggtacccgaagaacaggctgattcggaacacattgatatccaggaggacctgacatatgtggagaagccggttcgcatacttgataccagtgaaaggagaaccagaaacaaggtcacccggttttgccgagttcagtggagtcatcattcggaagaggaagcaacctgggaaagggaagatgagttgaaagccgcccatccgcacctcttcaccagctcctccgaatctcggggccgagattccgtttaaggggggtaggtttgtcacaccccgaagttttcctcccaagccaaaattgtaatttacaaatgaccccaagaaaatgcagaggaaatcaggataaaaccctaagaaaacaatgcaaacaataatcggatttgacatgtggaatttttcttgagttctacatgtcgaaattcattaacaggatttttagtggaattttcagagctctagaaataatttcaaccaattaaaaatcactaaagtgcaatttttaattccagggaaaatccttttcctttttctttttcttttccctccctttttccctcctttttccttttcggatgggccgccggcccattcccctccttctttccccccctccttgctgggccggccgcaggccgagggcccagcctggcagccgccgcccgcctcctctctcggggtcgccgacaggtggggcccacctgtcgggtccttcccccacctcccgccgatcccggcgcgccgccgcgccgaaaccgccgccgcgcccacgcctccgtccctcccgggccacgtcgaccacgcccgcgcgtgcgccgcattccccgcgcccgttcccctctctctcccgctcgcgcccgcgcccgagatggccgggattcgaaaaccgaatcccgcctctctctcctccccacttcccccacgtcggccgtcgaatcccgccgctcccggccaagtccggttcccccatcccctatttaagcatcgccggcaccccctctcgctttttccccattgcgccgacctctcccgaactccccaacgcctccgcgccgtgcaaccacccgccgccgccgcttttgctactccggccgccgctagccgccgctaggctcgccgccgtctcacgccgtcgccgccgttagcttcgcgcggccgaggtccacctcgtccacccctcctccgtcgaggttcgtcgccggagccctcatctccacgcgcacgggtgagcgccacctctaccgccgccttcggccatggatcccgatcgccatggtccatctctctctctctaatccctctcttctccttccttagggcacgccgaagctcgtccgctagccgacgccgtcctcccgtggcttgccgtcgccgtccgccatcgccttcctccgcgccggccaccctcggtgaggcatcccctcccttcttttcctcttcctctcctcctagagccgctagccgccgcttcgagtcgtcggccgtcgccttcgactgccgccgccgtttcccgtgccgccggtagccgccgtcgtcgcacgcgtgccgtcgccgtttaacccagccggccggtcggctttgatgccgagccgcgccggcggccgcatttatcgccgcccgccgctcctcctctagccgccgctccccgccgccggtcggtcgccttcggtcgccgccttgcgccgctgccgcatgcgcgccgccgccgtgtgagcgccgcgccgccggcgccatggtcgccgctgtctcgcgccgcgcccgcgcgcccccggccgcgaggtccccgtcgccgtccgatctacccttgggtagatcggggccgtcggttcggccgccacgtggcgccgccgcccctcctttccccgtgccactgaccagtgggcccgcgcgccgccacccccctttctctctctcccgggtcgctgaccggtgggccccgcatgtcggcgccgcgccccctcgctgacgtcagccctggttgatattgcgcaataaattatttaaggatttcttttatagtaataaacacagtgaatcttctaaaattcataactaattcatccgagctccgtttaatcccattcaagtctcagtaaatcaagaaaaatgtgtagaatccattaaaaatggttttgttctctgtttcagtagccttatagcctgtttgcaatgtttgctttgtatgtcgctagattccgatccctccgacgctccggtgtacttcgagatagtcgccgaggtccctccagcagcagagcaaggcaagtcatgcttgtcacttgaacatgttgatcccattttgcaaatgctctattgttttctttcaaatattgcattgttttataatatcactatgggtgggatacctattgttacagccatgcttttggatatcatgctcctttgttagcttgggttataacatgattagactttggactaggaattgcttagccatgcttagatcaactagcacacattggggatctcatttaaaacctagattataggtttatatgataatgttggtttaataccaccgctctggtgttggttaaataaaatgaaccacatggtgggctgtgggtgcatggttttgctagtcgcacccatggcagttaaggaccggttcgcgggatgccctggaagaatttatcgtacttaccacaagccagcgtgggcaacggctgggcttgtagtgtagctttcctctagtcgacgcatccaggcaagggtgggcgtgatggagcggggcgggccctgcgacggcctctgtcgcttccggattcacctaggcacgagaggggactgcccgtcgcccgctggggacgggggtgaaacctgaggtgtggtgtgcttggctagagggggttatgcgaagggtcctgtcacggcctctttccggtatgtcgtggtggcatgtcggcgcacggaaacgtgtcgtggggctgtgtcttgtgggtacagttgtacacctctgatcagagtaaaactattcgaatagccgtgcccgcggttatgggcggtcaaccagattcaccgtgattagtctcaccctagtgaaatctgttgaattggatagtttaggtggatggttgggcctgtcgcaacgtgggttagcgttggacagcggatgtttaatactgcttaattattacaaccgttttcgcattcaattcctgtttataaatgccagtttttatgcaaatgaaccactctagctcttctttgttaattccctgcatcatacccctattccggtatgacttgctgagtacagtgggtagtactcagtcttgctctacttttcccaaccccagaggacgggtatgtgtcagatgaaggtttccctgaggagtaggcttcgtccgtgccgtcgaggatgcctgtggagtggtgttcccgctgcagttcaagtcaaggcttagctccagtttcttttgttttccactgcatttctgtaagacctttatgatgtttgtaagacgtggatctgtatgtcaacattgtcgtttgtgtaccccggctggtcctggacgggggttttaatacacattctgcttggaatcctattcgggaatttctgggcgtgacaatcagcaacattcttgatagctgattttaactttgctttttgttcttcgatcgactgcgggagatcggctaacttcttgtgctctaaatccagttcggcattgcattcttgaagttgtgctaagagttcaatcttgcgagcttcaagccagtcaatattggatttgatcgggccttcagataattgatcgagcttggctttttcttcatgaacaagttgtcgagtggcctggattgttgcttcaatgtctttgcgctctcgacgctcggctaatcttagcttagacttttccagcttaaattgatgttgttcaagataaacagctggagtaaggataccggctaactcatctgagatttgagcctggacttcatgaagccaagtcctgattgatccacagtcgactactaggctgtctagtgatgatgtctctagccgatgagaaatatcttcaagaattttcttcacgtcgtcagacaaaggagctaaagctttgctagtagtgtcatcctctatctcctcatcaagataatctctgatatcaaaggagaaaagatcggctaagacctgcagtaatgatttgaagagggttagagatcaaacaggcatagccgatctgcatatgttagttataagtaatttactggaatagccggagcaattggttgaacttcttcttctatgtgatgactccctacagctgatggggttcgatcgcttgatgcttgttgaataggaggggaatgaggctgaaaataaacaagtgttatataaaatcggctgacattaattaataaaagaagtaagattattgtaccggtggagctggtttagatgtcattggagtcgatttcttctttacagcagccttccttttctgcaattaccgagtatgtgaggaatcggccataaagtgagatgattacaaaaatagttaaagaagggtgcttactcttgtaaagggagttggagcagaaggagttggaggggtctgcttaggtgaagctgatggtgttgtcagtatcgcttacttcggctgcggcttgatcaacgtcttctccgatttcttcttcatccagagcttgttcaatggatggatctagggcaggcagatcatcagctggtttagctttctttttgattttcttctttggagctggggctgaagtatctacagccgatgatctggttttccttttcctaccggcatcggctggttctctgataagcccttggagaagagctgaagtcttgggggcatcatagctgatgacagggtgagatggcccacctccattaggaattaagcctggggcgtaggtgatatccttgccgctgttgctttgacgaggaggagaggattctgttgtctacaaatcaaagaaaagattagttaagataaatcggctaggaagttattcaaatgaaatcaagttgagtcagagccttacttgagggacaacatctggaaagaggtctgtcatgtacattgaagctagttggtggaatagatgcaacttccattcaccccaccatctatcaaagtttttgctcctaaacattgctagctccagatttccaatgcttcccagagggggtcctggaagattgagcagccgatccatcatcaaggttgatgaatttctcctcggcattgaatcttgtcagcaaagaataagccgattgggagttggcccattccaaactgtatagctgaactcactgggtgatagaactcataagaggcttgaatatttcttccttgatggatgccgactggaagaatacatgggctgattgcagctgtgaagatttctctggatgtttgaaatctttcatgattaatgtcttcgaatctaaaatctgatgggagctcaaggtctactgaatcttcatagggaaaccaaactcgagcatctttttgaaagccttcatagagactgcagaaccaatttttgcgcagttcggctgataactttgctccagcatcagccggtgtggatgcgtattctccatatgacatacatcggcggtgagtgcgttcttcgtcatcttttgtaatcggctctaatcttggaaattcagcttctgtcacagatggccgattgacgactttcataactaccaagtttagccaggtttgcaacaaccaccatggtccacctgccccaactgctgagttgatggctatcttggccgatgcattatttaacatttgatatagatagccgaggaggattttgcccaagggaaattgtttctttgattctagggcttcggttacaaattgccaattggtagtagggccacagcttgatccacaaaaaaggaatttttctagccacatcagcagaaaggctacatgctctcgaggagtgacgggccctttacccatgtatgctgctacatagcctgaccaaccacctatgctcttggtcttgaagtcgtattgattcttcgtgttcaggctcatagggttagccgatgaggtgacatccagacccgtgatcataatgacgtctatgagagttggggtcatcggcccttggttgaataagaaggcattgatagtgttggaccaaaaataggtggcggcagccatcagaggttcgtccttagcagaattagctatggtaagggcaagcgcttggctgattccgatctcatcccagtgagctgctttattcgccgatacacgcttgtaccatgtggtccaactcttctcaggggccgttttctcaagagatggccaagatttgaaggtattcttccaatgattcagattagggttggctaatctaaaggggattctgttggtttcaccagtgataaaatcggtagggtcgaggttgccgattgggccgagaaagtaatggttctcatgcgacagactcggaattgcaaccaggttggacagatgctgcagatgcaggtagggatggaggagaagaaaacaagataaggcaaaagaaaatcaatctgctgcggaaaaaagggatctagctgatgggtgcttacctctgcgtattcggccgatggcgcggtggatagattggcggaagtcgacattaccacaggcggagatctggctggcgacggaatcgtcttgaaatcgcctggcgcttcggaggaattgctggagagaaagagggtgaagtttcgcataagcggtgaggatggaagttacggtgtgagatttctcggggataacggttagtatttgaagcgctagggtaacaatcggaaacgaccgattgcgaaacttgctcggagtcgatacacggcaaatccggaacattaccaaatatcccggacttggggggcatgtgttaacgaccaaatttggtaatatcagtatcggagataaagatgggatcgaagcggaatcgaagatgaggattgttgcagaaacagagtaaggatcggctggagtccggatcggctacgactgggatcggctaagtctgagttggactggttaagtgatacaaccgattccagcaatacgacccgtgtgcgacattgggttcgagttgatgtgcttcaagatgattgccacacaaggatagagtcctgggaaggaaattgtatctattaattaggatattttatgtaaattccttagagataaatgtgggcaaaagtctgccgcaaagacttatggtatcttagagtttgttagagataagagtcgtgtccaatatgtacatatcttgtaattctcgggtatagatagactccgagccctatgtaatggttaacacacacgttcaatacaatttcggcgcatcgccaccttttttgttttagttttatttcgacgagttcttgctttcgggttgagctgcatcggtttcgatcttcaacaagaggtaaaacttgttatggcggcttgtgttctcgagattagtgcttccatctttatgatactctaactttgtttatgtaatccgtcaagttatcatatatcttgcataatcttcgacaatatcgtcatctaacttacaatcagctaacatctgctaccagaagacatccgattaggttaaataacgacgttggtttagactatatgagatatccaccaccctatgaaacatccagcggcttgatcgtctagatattgttcttcttttcatacttaatgctacatcagttgagtttgatctattaagtcgtgcttagaatttcaatctctagcctgcttactggttgccgattagggtagtatcggagtttcagccgatcttatctgatctaattgctctcgctctatatgctcaattaatatgttagatctgcccttcatgttaagatcttgtggcatttaagtatattagatctctgtttagtatattctatttgctttaatatcttaatataaagtagtatcggagtattagccgatacatgctagatctatttgatcggctatgctatgaatatgtataatcttattattaacatatatttcaacctaagtgatttatactgcttcggcaaggtgaccgatctatcccaatcacttggtttaagtatatgtcggtataaggattatatatcattgatatctacagccgatcgggtagatatagttccgacttgtttccttaacaattgccgatcgattcacatatgacatcggctcaaagataaatgatatgtcatcggcatctagccgatcgactatcatttatggatttaatcacggtttctttgtctttgtttcttgttgattgcaggatcaaatcaactagcacgctcatacatccgaaggcgagttttggacctgcactggagttaagcagatcccccaggccacgtgttttccatcaacacagatatgtttatatatgtgtatgccaacctaccgatctaggtagttggtattgtgaagacatgtggatccctgtgttataaaaccgggtcccgacacatgctcaccggtgaaactaggtgacgctacgatggccattcaggcaattagaccgaggacgaaaagttagagagacgagccagtgcatcgcccacccgtggctgcatgagtaacccaagcaaagaagcttcacaaagaaggcgagccatcgctggtcttttgatatgatgctaatggacaaattgatgcttaattatgcacttgattttacacgcaacgtggttggggggagggttctgtgtcccaatgggaggtgccgggcccaccccggcactctagtagatgcgcttccctcaccttatctcacccaccatccctctccctggacaacgacttgaggacgttcttcaccgttgccagagttagcctagatatgcccctatgcatctaccagatctacatgtgaaggggcatgaggaagcagataactaaggtgacgttgcatcctttcgccatagctcgaggtctagcatgatgataaagtcactattctagggattagagttggcggcatgttctttaatttggggggggagaatggtgtccactaggttgatcatgaggacaactcttgacatgtggtcatcgtcgtgcccatcagttactctctagcgagaagttgagcagcttcttcgatgttgtgtgcattatgtcttcgccgcacggttcaggcaaatggctggtcacccaagcatcatgatgctcatgcagcagcgcgtgcaccatgcctgttagtatttgatacagttacagataaaatccacaagcgcatggatataccgatgtagcacttcccctacggagtattccaagggtatcgaatccaagggaacgtgtgtgatgagaggttcctctggttcatccaaggacaccaagcaaatgatagtccaggatagagaggattcactagtgagaaacagtgtctagggaatgcttaattttaatcctaacgcaatacttcaggcactggcaacccgctgttcccagatgtcgctctactacgtacccggacagggaggacttcattgatctcgagggctgtcaccacctctacacccacctcaacgtactgtgggatacgcaacaattactggataacaattacctaaacaccacgtcaaagcaattactatctactttggtgtttataactcaccaaagcaatcactatattttagttgattatagtgaacaataatcccgtatgctaattaggaactaaccaagaggtaattctcgcaagataaatctaattactcaagaagaatattatattgaattcagagtaataaatagattaaaagaaataggagaagattaccgacaactccggaattcttccgactccttctactctactctcttcctattctattatacaatatagtacaatagagcctcttataattcagctcaaccttggaagtgtgtgtgtgaagtgagggagtgaagcctttatatagaggtaggtatgacggttggcgaagaggaaatgtccgaagtgccctccaaccgccatcagggatgcatctggaacgtccacgccaaaccccacatccaatggtggagatagtggttccgccgaacctggtggtttggccgaacttgggctaggtccattgtcacgcccagaaattctcgaaccagaatttctaagctgaatgtgcattaaatccctgtccaggaccagccagggtacacaaacgacaattgttgacatacagatccacgtcttacagaaatagaaaagattacaaatgcagcggaaaagataaaagcgagctaaaccgggaagcttgacttcagcagcgggcggctccactccacaggcaatccttgacggcagcgacgaaaccaactttgacaaaacagctccaactaggaagatcttcagctctggtgtgggggaaaagagagcaagactgagtactacccactgtactcagcaagtcataccggaagaggaggtatgatgcaggatataaccaaaggaggctagaggttcttttgcataaagctagcatttaaaagcagtagttgaaagtaggaaaacagttgtagtaattaatcaatattaaccaaacactgtccaacgctacaccacgttgcaacaggcccaaccaaccacctgaactacaccagttcattaagctaaactaggggtgagactaatcacggtgaatctggttgatcgcccataaccgcgggcacggctattcgaatagttttactctggccagaggtgtacaactgtacccacaagacacgattccacacatgtcgccatgccccgaagtatcaccatgatactgcaaagggggggatcgtgacaagaccctccacataaccctcccctaaccatccacaccacgctaaggtttcacccccacccctcaaaaggcagtgggcggtcccctcttgcgccgcggtgaatccggcagctggacaaccggacaccccggccgacccaactccatcacacccaccctcgccaccggtgcctaggaaagggtcgagctatacttcagatcaagcagttacccactcccgcttgtggtaagcacggtaagtctcccagggtttcccgtgaaccggtccttaactgccatgggtgcgaccagcaaaaccatgcacccacaacccaccattcaatgtattttaattaactaacaccattgcggtggcaccaatctaaagctatgccaatagacaaagtctatgtaataaggtgatccccatttgtgtgctagttgaactaagcatggctaagcatttcctaaaccaacatctagtcattttgatacccaggttatcaatggcatatggtacaataaatggctgagtaataggacccattccacatgttattgtaaaagaatgcaacatttaatagaaatgcgggatatttgtaaattgggtacaatatgatcaaacgtattgcatgacttgccttgctctcgcactgacgagacctcagcaacgtcttcgagaaaccgtggatcgacgaaacggccgaaacctacgcgacaaacaaagcacacaagcaaaacatgctataagactacagaaacaggaaacaaaaccatttttaatggattctttgcatttttcttgatttactgagacttgaatggacttaaacggagctcggatgaattacttatgaattttagaagattcactgtgtttattactataaaagaaatccttaaataaattattacgcaataaattccagggctgacgtcagcgcggggcggcgcggcgccgacatgtgggacccaccggtcagcggcacgggagagagagaaagggggcggcggctcgcgggcccaccggtcagcggcacgggaaaaaggatggggcggcggcgccacgtggcggccgaaccgacggcccggatcgccctcaggccgatcggacggacgacggcggcggcaaccccgggctcggatcggcgtcaaagccgatcggccgacccgagctagcggcggcggtgcgggcgcgtcgcgtcgccggcgacagcatccggcggcggaggcgacgcgaaagcggcggcagcggacggcggcaacgacccaaaacgacggcgagcgcgggcgacggcgacgcacggggaaacggggaaggagaggagaggagatgcctcaccgagggtggccggcgcggaggaaggcgatggcgagcggcggcggcaagccacgggaggcgacggcgaccggcggacgagctccggcgtgccctaaggaaggaggagagagggattagagagagggaggtagaccccggcggtcggattccatggccgaaggcggcggtagggatggcgctcacccgtgcacgtggggagggggttccggcgacgaacctcgacggaggaggggcggacgaggtggacctcggccgcgcgaagctaacggcggcgacggcgcaagacggcggcgagtctagcggcggctagcggcggccggagagcggaaagaagcggcggtgggtggttgcacggcgcggggacgatggggagctcgagaggggtcggcgaaatggggaaaaagagagagggggcgctggcgatgcttaaatagggggagagggggtcggacgtggccgggagcggcgggattcgccggccgacgtgggggagtggggcggagagagaggcgggattcgaaattcgaatcccggccatctcgggcgcgggcgcgagcgggagagagaggggagcgggcgcggggaacgcggcgcacgcgcggacgtggccgacgtggcccgggaggggcggaggcgtgggcgcggcagccgttgcgggcgcggcggcgcgccggggtcggcgggaggtgggagacgggcccgacaggtgggccccacctgtcggcgaccccgagaggagggaggcgggcggccggctactgggctgggcctcggcctgcggccggcccagcaaggaggaggggggggaggaaaagggaaatgggccgacggcccatttcgcaaaaaggaggaaaaagaggggaaaaagaaaaagaaaaagaaaaaggaatttccctggaatttaaaattgcacttgctccattttaattggttaaaattatttccaaggctctgaaaattccactaaaaatcctgttaatatattgtgacatgtagaatccaaaaaaaaattccacatgccgattctgattattatttgcatttattaattagggaattagctctaggttaattaagataatttcttcggacgatttatttagccaatttttaaagcaagcaaaggggggaaaacttcagggcgtgacaaacctaccccccttaaacggaatctcgaccccgagattcggaagagctggcgaagaggtgcgggtgggtggccttcaactcatcttctctttcccaagtggcctcttcctctgagtggtggctccactgaaccttgcagaatcttattactttgtttctggtctttctctcgctggtttcgaggatacgagttggcttctccacatacgtcaagtcttcctggatttcgatttgatccggacttgcctgttcctcaggaactctcaaacatttcttcaactgggagacgtggaacacattatggatgccaagcatgttggagggaagctcgagctggtaagcaacttcacctctacgttccaaaatccgatatggtcccacaaagcgtggtgccaactttcctttggtttggaagcgatgtactcccctgagcggagtgacacggagatacacataatcccctacttggaaaacgagctcccttcggcggttgtctgcatagcttttctgccgagactgcgcgattctcaatctttccctaacagctctgactttctcttctgcctcatttaaaacttctgtaccaaacaactggcgttcccctgtctgatcccagaagagcggagtacgacaccttcgtccatacagtgcttcaaatggtgccatctgcagactagcttggtaactgttgttgtacgagaactcagcatacggtaagcttttgtcccatgctccaccaaagtcaagcgcacaggctctcaacatatcctctagtatttggttgacccgctcggtctggccgtctgtttgtggatggtaagcagtgctgaaattcaaccgggttcccaattcttcttgtaatttctgccagaactttgaagtgaattggcttcctcgatcagacacgatcttcttaggtacaccatgtaaacacatgattcttgctagatagagttctgctaatttctttcctgagtaggtagtgtgcaccggaatgaagtgagccactttggtgagtcggtcaacgactacccaaatagaatcatgccccgatgacgtcctgggcaaaccggtgatgaaatccattccgatttcttcccacttccattctggaatctgaagtggctgtagcaaacctgctggcctttggtgttctgcctttactcgttgacagacgtcacagagtgctacgaactcagctatttcccttctcatgctgacccaccagaacttttctttgaggtcttggtacatcttagtactaccgggatgaatggaatattgagtttgatgagcctcggttagtatcaggtcttttaattccttgttttcgggtacacacaatctttctcccatccagattgttcctctttcatcctcaacaaaacctcgggcttttccgaccctcatgttctttttgagctctgctatttcaggatcacttgcttgagctatgcgaacctgctccaccagtgtgggctgtgcctctagggcagccacgaatccgtgctcaactataccaaggttcaaatgttccaaatcatgttgaacctcacagcatagttcctctacccatgcgacgttgcagtaactcttcctgctcaaggcatctgctaccacattagccttgccgggatgatagtgtattcccatatcataatctttaattagctccaaccatcttcgctgtcggagattcagatcaggttgggtgaagatgtactttagactttggtgatctgtatatacctcacaacggttactgatgagatagtgccaccaaatctttaaagcatgaacgactgcggccaattccagatcatgcgtcgggtagttgccttcatgaggacgcaactgccgtgaagcataagaaaccactttgccatcctgcatcaacacacatcctagcccctggcgagatgcatcacaatagacctggaaatctttcgtctgatcaggcaggattaagactggtgcagacaccaaccgtcgtttgagttcttcaaaactcctattgcattcagcagaccagataaacttttcttccttcttcaatagctgtgtcattggcttagcaattttagagaagttctcaatgaaccggcggtaatagcccgcaagtcctaagaaactccgaacctgagtgactgtccttggtggggtccacttggtaactgactccacatttgctggatccacagctactccttgagcattcacgatgtgaccgagaaactgaacttccttaagccagaagtcgcacttgctgaacttggcatatagctggtgctcttttaacttttcaagtaccagtcgaagatgctgctcatgttcttcctcggacttggagtagattagtatgtcatcgatgaaaaccacgacaaacttgtctagaaattccataaacaccttgttcatcaaattcatgaagaaggcaggtgcattagtgagtccgaaagacataactgtgcattcgaacaacccgtaccgagtgatgaatgctgtctttggaatatcctcttcgcggatcctcaactggtgatagcctgatcgcaggtctatcttagagaacacagtagctcctatcaactgatcaaacagatcatcaatccttggcaaaggatacttgttcttgatggtgacctcattgagtgcgcggtagtcaacgcacatcctcttggttttgtctttcttctccacaaagataaccggagaaccccaaggcgacgtgctcgggcggatgtatcccttctgtaactgttcatcaacttgcttcttgacttccgccaactcgttggctcccattctgtaaggcctcttgtggatcggtgcagttccaggtaccaagtcaatccggaactcgatatccctttttggtggcattgttgtcagatcgtccggaaaaacctctggatactctctgactatgggaatatcctccagcttcttagtggttttctccactgctacctcttgttcttcaccagcagcctggtttaaactaatccctggcttccgcggcactggagactggaaggttaccacctctccttttgcattggtcaacttgatggtgcggctggcgcaatcaatcactcctctgtgccttgtcaaccaatccattccaagtatgacgtctaggtccttggattcgagaagaatgaggttggctggaaaaatcaacccttgaatttcaactgtcacagatgggcagtagtgagttgtggtcatgccacctccaggagtatgaactcgcattggtatcttaagcttcactaaagataacccatgtgcaccagcaaaacgcttggaaatgaaggaatgggttgcaccagaatcaaacaatattactgccggtgtcgagttgacggggaatgtgcccaatataacctctggtgctgactgcgcctcctctgcagatgcatgattaacacgggcctgaacgaacttgggtccggcacgtcttggcttcgggcactttccaaccgtgtgtccgggtttgttacaattgaagcagagttcgggtttttctcccaacctcttgggctgttctggcagagctggctgaactgattgagctggaatctttagtgaactcggagtagggttgaggctgtgctgctcactgttgttgtgactgccactatggtggttcttgttgaagctacccgggtggtagggacggtgctgtcggataatcatggtggaaggtccaccgtgacgtcccatcgtgaaacgaggcttccgacacttcccctggggagtcctgaactgggctgccttcctcttacggttcattttgttacactgctcctcttgacggatggccttgtccacaagcttctcaaagtcctcatagtctctagagatcagctggttggtcaattcatcatcaagaccagacataaacttctcctgcctctcggcatcggtacgcacgtcctcaggggcgtagcgcgcgaggcggttgaactcatgcaaatactctataactgttctggttccttgttgcagggaacggaactctctcttcttttgtgccacgattccctcgggaacctgggctttattgaaactatgacaaaactctgtccaactaacctctgccccagctggacgggtcaccatgtagttgtcccaccaaatagaagcgggaccttgtagctggtgtgtagcaaaagcaaccttctcctgctcgttgcattgcaaaagattcagcttcttctcaatggcatgaagccagtcgtgggcctcgattgggttggtggtgcttgagaaggtgggcggcttgacacgaagaaattctagcagtttgcactgaggaggtggagaaccaaactgcaggttctgctgctgcagctgtgcttgctgctgcacctgctgcaacacctgatggtactgttgctgcatctgttgcatcatcattgtcatcatctgagtctgattgtccaacacctgagcaattgttgggttctcgggcggtggggacggactgttgtaagatgcaccgttggcacgtgctccattgatcggctcttcgctgccactggcgttgttcgagtcgcgtgaaccattccttatctccatctgaaggggataggtagaaatatgagaaaaggaagaaaaacaggggctcagaaactaatcttgcttatgaatttaagtgcaattatcttaatcttgattaaaacactgaaaaagaggcacgcaactcctaattgaggcagtcataccactgacacatgatatcggccgccgactagcccacaagcaacaaacctaaacacgaaaactagcaagcaaccagactaagaagacgataaagctaagggcggcgactctgaagctcgaggcggcgctttgcaaacgagggataggactgacatctaaagtagacaagggataggaaccaattcatgctcaaacccaaattaaacaaagcaaaagaaaactcaaataaataaccgagcatgatgatttttatgcatagaacatttttcatgaactcaaataaagacactaatgcaactaaacaataaattaatgcatagactagttgcatggaaaacgatgcgcataacattgcccccatcgaatatagacacgacctaatgcataacccccaataaattcccgactgactgtcgaataaactccaactaaaatttttctaaagccctagactgagctaatattttttttttttaaaaaaaaaaaatccgatccgaaagaacgaccaagatttttcccgcaaaccaaagaggcaaaactccaaattttcccgaaacaattccaggtgcaaaaaggcatatgcagatgaaaaaggggttcagagggctcttaggtttccagttggcttgtcctacggtcaaggtcggctctgataccaacttgtcacgcccagaaattctcgaaccagaatttctaagctgaatgtgcattaaatccctgtccaggaccagccagggtacacaaacgacaattgttgacatacagatccacgtcttacagaaatagaaaagattacaaatgcagcggaaaagataaaagcgagctaaaccgggaagcttgacttcagcagcgggcggctccactccacaggcaatccttgacggcagcgacgaaaccaactttgacaaaacagctccaactaggaagatcttcagctctggtgtgggggaaaagagagcaagactgagtactacccactgtactcagcaagtcataccggaagaggaggtatgatgcaggatataaccaaaggaggctagaggttcttttgcataaagctagcatttaaaagcagtagttgaaagcaggaaaacagttgtagtaattaatcaatattaaccaaacactgtccaacgctacaccacgttgcaacaggcccaaccaaccacctgaactacaccagttcattaagctaaactaggggtgagactaatcacggtgaatctggttgatcgcccataaccgcgggcacggctattcgaatagttttactctggccagaggtgtacaactgtacccacaagacacgattccacacatgtcgccatgccccgaagtatcaccatgatactgcaaagggggggatcgtgacaagaccctccacataaccctcccctaaccatccacaccacgctaaggtttcacccccacccctcaaaaggcagtgggcggtcccctcttgcaccgcggtgaatccggcagctggacaaccggacaccccggccgacccaactccatcacgcccaccctcgccaccggtgcctaggaaagggtcgagctatacttcagatcaagcagttacccactcccgcttgtggtaagcacggtaagtctcccagggtttcccgtgaaccggtccttaactgccatgggtgcgaccagcaaaaccatgcacccacaacccaccattcaatgtattttaattaactaacaccattgcggtggcaccaatctaaagctatgccaatagacaaagtctatgtaataaggtgatccccatttgtgtgctagttgaactaagcatggctaagcatttcctaaaccaacatctagtcattttgatacccaggttatcaatggcatatggtacaataaatggctgagtaataggacccattccacatgatattgtaaaagaatgcaacatttaatagaaatgcgggatatttgtatattgggtacaatatgatcaaacgtattgcatgacttgccttgctctcgcactgacgagacctcagcaacgtcttcgagaaaccgtggatcgacgaaacggccgaaacctacgcgacaaacaaagcacacaagcaaaacatgctataagactacagaaacaggaaacaaaaccatttttaatggattctttgcatttttcttgatttactgagacttgaatggacttaaacggagctcggatgaattacttatgaattttagaagattcactgtgtttattactataaaagaaatccttaaataaattattacgcaataaattccagggctgacgtcagcgcggggcggcgcggcgccgacatgtgggacccaccggtcagcggcacgggagagagagaaagggggcggcggctcgcgggcccaccggtcagcggcacgggaaaaaggatggggcggcggcgccacgtggcggccgaaccgacggcccggatcgccctcaggccgatcggacggacgacggcggcggcaaccccgggctcggatcggcgtcaaagccgatcggccgacccgagctagcggcggcggtgcgggcgcgtcgcgtcgccggcgacagcatccggcagcggaggcgacgcgaaagcggcggcagcggacggcggcaacgacccaaaacgacggcgagcgcgggcgacggcgacgcacggggaaacggggaaggagaggagaggagatgcctcaccgagggtggccggcgcggaggaaggcgatggcgagcggcggcggcaagccacgggaggcgacggcgaccggcggacgagctccggcgtgccctaaggaaggaggagagagggattagagagagggaggtagaccccggcggtcggattccatggccgaaggcggcggtagggatggcgctcacccgtgcacgtggggagggggttccggcgacgaacctcgacggaggaggggcggacgaggtggacctcggccgcgcgaagctaacggcggcgacggcgcaagacggcggcgagtctagcggcggctagcggcggccggagagcggaaagaagcggcggtgggtggttgcacggcgcggggacgatggggagctcgagaggggtcggcgaaatggggaaaaagagagagggggcgctggcgatgcttaaatagggggagagggggtcggacgtggccgggagcggcgggattcgccggccgacgtgggggagtggggcggagagagaggcgggattcgaaattcgaatcccggccatctcgggcgcgggcgcgagcgggagagagaggggagcgggcgcggggaacgcggcgcacgcgcagacgtggccgacgtggcccgggaggggcggaggcgtgggcgcggcagccgttgcgggcgcggcggcgcgccggggtcggcgggaggtgggagacgggcccgacaggtgggccccacctgtcggcgaccccgagaggagggaggcgggcggccggctactgggctgggcctcggcctgcggccggcccagcaaggaggagggggggggaggaaaagggaaatgggccgacggcccatttcgcaaaaaggaggaaaaagaggggaaaaagaaaaagaaaaagaaaaaggaatttccctggaatttaaaattgcacttgctccattttaattggttaaaattatttccaaggctctgaaaattccactaaaaatcctgttaatatattgtgacatgtagaatccaaaaaaaaattccacatgccgattccgattattatttgcatttattaattagggaattagctctaggttaattaagataatttcttcggacgatttatttagccaatttttaaagcaagcaaaggggggaaaacttcagggcgtgacatccatctggcctggcctttggcccatgtcctcccctggttctcctttatccatttcttggtattttgggctaatttactgatgtttcgatgaagttcacagcccatccttgtatggatacagaattctcctcactttagtctagatttcctcccaacatcagagtttatcatctgcatataaatatatatcaacacttgtgaaatacgtgagattaagcacctatcactatgttggatgttttattgtctgatctttatgcagatgttggcggtatagaatcggcatttaagagccgccaacaatgccgtggttggttacttgtaagaagccctactactccaatgctgcacgcatgacgtcttcatggcacagctttgccaattcaccagcgtccaagatgtccaagttgatgatagggagatcgcacttacttccatttctttttcctggtggcacatctacagctcgatttgaggaggtagatgtcacgcccagaaattcacgagccagaatttctaagctgaatgtgcattaaacccctatcctggaccagccagggtacacacacgacaattcttgacctacagatccacgtcttacaaaaaatataaaagattacaaatccagcggaaaagataaaagcgagctaagcttgaagacttgactcctgtagcgggcgattcctttccacaggcatccttgacggcagcgacaaaaccaacttcttcgagacatatccaattgagaaggacttcaactctggagtgggggaaaagagagcaagactgagtactaccccctgtacttagtaagtcataccggaagaggaggtatgatgcaggatatatccaagggaggcaaaaaggttcttttgcataaagctagcatttaaaagcagtagttgaaagcagtaaaacagttgcagtaattaatcaatattaaccaatcactgtcgaatgctacaccacgttgcaacaggcccaaccaaccacctgaactacaccagttcaaaagctaactaggggtgagactaatcacgttgaatctggtcgaccgcccataactgcgggcatggctattcgaatagttttactctgatcagaggtgtacaactgtacccacaagacacagccccacgacacatttccgtgcgtcgacatgccaccacggcataccgaaaagaggccgtgacaggacattgcccacgctggcttgtggtaagtacgataagttcttccaaggcatcccgcgaactgatccataatcgccgtgggcacgactagcaaaaccattcacccacggcccaccgtgtagtgtattttaattaactaacaccattgcggtggctctattccaaagctatgccattaatcaaagtctatgctttaatgtgattccttctttgtgtgctagttgaactaagcatggctaagcatttcctaaaccaacatctagtcattttaaaactcaagttatcaatggcataaggtaaacaatatatggctgagtagtaggacccatcccacatgatattgtaaaataatgcaacatttgatagaaatgtgggacatttgtaaattgggtacaacatgatcaattataatgcatgacttgccttgctctcgtgttgatgagaccacagcaacatcttcgcggaaccgcggatcgacgaaacggccgaaatctacgcgacaaacaaagcaaacaagcaaaacatgctatacgtctactgaaataggaaacaaaaccatttttactagattctatgcatttttatgaatttactgagacttgaatggacttaatcggagcttggatgaatgagatatgaattttagaagattatctgtgtttttactataaaagaaaaacccttaatcaatttatagcgcaataactcatcccaaggctgacatcatcaaggaggggggcggcgccgacgtgcgggacccacgggtcagaggcacaagggtgaggtagtgggtactggtagacagggcccactgggcagtggctcatgagtgaggaggtggcaccggctttgctcggctcggcttcaagccggatgactatgatggcgatgcggcggcggcgggtcgttgccggcgacggctaccagcgcgagaagcggcggtgggcggcgcgaaaagcagtggcggcggccgaaggcgacgccgcgcgcgcggaggacggcggcgcacacgggagagagggaaagagggaggagagggagttctcaccagcaggcacggcggccggcatgaaggatgaaggcggcggcgatgacctgacaagcggaggggtaggcgggcggaggttgctcctacggaggaaaatggagaggacttaggggttgggaggaagcccacggcggctagcgtggccggtcggagattggaagggcggcgaaactcaccggcgcacggagagagcagcgttccggcggcgggattggatgaggatgcggcggccggggtagctttggcggcggcggcttagctcggcggcgagcggtggccggaggagtggagatggcagcgatggatggtgcacggtgcgggagcggtggagagctcgggagcagccggcgagtgagggaaacgagagagggggttgcggggaagctttataggggctcgggtggggcggttgtggccgggaatgggctctatttggccggtgacgacgtggggaatttggggagagagagagagagcgatagagacgggattcaaaatgaaacccgcctctatgcgggcacgcgcgcgcgggcgggaaggcgacgaagggggcgggcaacgtgggcggcgacgtgggggggcgtgtgggcacggagtggggtgcggatgcggacgaagcggcggcgtgggcggcggtttcggcggctgttgctgccggctggaggagaaagacgaggccgacaggtgggccccacctatcggtgacccggagagaggagggagggacatgtgggccggcccagcaaggaggagggcggcgcgggaggagtgggccgacgacccaaatgaggaaaagaggaaaaagaaaagaggggaataggaaaaaaagattttcctgggatttaaatattgcactttgcttattttaattaggtaaaattatttccaaggctctgaaaattccactaaaaatcctattagcatattttgacatgtagaatccaagaaaaattccacatgtcgattccgattattatttgcatttattaatttagggattcacctctaggttaaattaaatcatttcttcggacaatttattttatgaattttaaagcaaaaaggggaacttcagggcgtgacaaacctaccccccttaaacgtaatctcgaccccgagattcggaagagctggcgaagaggtgcggatgggcggccttcagttcatcttctctttcccaggtggcctcttcctctgagtggtggctccactgaactttgcaaaacctgatcaccttgtttctggtccttctctcactggtttcgaggatacgtatcggcttctccacatctgtcagatcttcctggactagcttgttcctcgggtaccctcaaacacttcttcagttgagacatatgaaacacatcgtgaataccagccatattagatggaagctcaagctggtaagcaacttcacctctgcgttccaagatcctgtatggtcccacaaagcgtggtgccaactttcctttggtttggaaacggtgtactccccggagcggggtgacatgaaggtacacatagtcccctgcctaaaaagtgagctctcttcggcggttatcagcataactcttctgccgagactgggcgattcttaatctttccctgacggttctgactttctcctctgcctcggttagcacttctgtcccaaacagttggtgttctccagtttggtcccagaagagcggagtgcggcacttccgtccgtacaatgcttcaaacggtgccatttgcaaactggcctgataactgttgttgtaagagaattccgcatacggtagacttttatcccaagctccgccaaaatcaagtgcacaggctcacaacatatcttccaatatttgattgactcgctcggtcagaccatcagtttgcggacgataagccgtgctgaaattcaaacgagtccccaattcttcttgtagaactttgaagtgaattgactccctcgatcaaatactatcttcttaggtaccccatgcaaacacatgattcttaaaaggtagagctctgccaaccttttcccagtataggtagtgtgcactggaatgaaatgagcgaccttcgtgaggcgatccacgactacccaaattgaatcatgccctgatgatgtcctgggcaaactagtgatgaaatccattccgatttcttcccatttccattccaggatctgaaggggttgaagcaatcctgcaggtcactgatgttctgccttaactcgctgacaaacatcacagagcgcgacgaactctgatatttcccttctcatgctggcccaccagaatttctctttgcggtcctggtacattttagttctgccgggatgaattgaatactgagtttgatgagcttctatgagtatcagatccttcagttctttgtcttcaggtacacacaatctttttcccaaccagattgtgccatgctcaatatcatgagaatctcgggcttttccaaccctcatattcttcttcagctcagctatttcaggatcatttatttgagctgctctgacttgatccacgagcgtaggccgtgcctctagagcagctacaaacccgtgttccacgatgcccaaatttaggtgctcaagatcttgctgcaatttgtcacacatgccttcggtacatactgcattgcaatagctctttctgctcaaagcgtctgccaccacatttgctttgcctagatgatattgtatccccatgtcataatcttttatcaactccagccatcttcgctgtcggagattcaagtcgagctgggtgaagatatacttcaggctcttgtgatcagtgtagacttcacagtggttgccgataagatagtgccgccagattttcagagcatgaaccactgctgccaactcaaggtcatgagtagggtaattgctttcgtatggacgcaactgccgcgaagcatatgcgaccactctgccttcctgcatcagcacacatcccagcccttggcgagatgcatcacagtagacctggaaatctttcgtctggtctggcagaattagaactggtgcagatactaaccttttcttgagttcttcaaaactttggttgcactcagctgaccacttgaatttttcatctttctttagcaactgtgtcatgggtctggcaatctttgagaaattttcgatgaaccgacgttaataacccgcaagtccaagaaaactctggatctgagaaactgtctttggtggggtccacttagtaactgactccacatttgatggatccactaccatgccttgagcagaaatgacgtgacccagaaatttgacttccgataactagaagtcacacttactgaacttggcatataattggtgctccttcaatttctcgagtaccagacggagatgttgctgatgttcttcttttgactttgaatagatgagtatgtcgtcaatgaacaccacgacaaacttgtccaaaaattccataaacactttgttcatcaagttcatgaagaaggccggtgcgttggtgagtctgaatgacataactgtgcattcaaacaacctataccgagtggtgaaagctgtcttggcaatatcctcttcccgaattctcaactggtgatagcctgatcgcaggtctatcttggaaaacactttagcttcttttaactgatcaaacaggtcatcaattcttggcaatggatatttgttcttgattgtgacctcattacgggcgcgataatcaacgcacatcctcttggtcttgtctttcttctccacaaagataaccggagcaccccaaggtgaagtacttgatcggatgtaccctttctgcagctgttcatcaacctgcttcttgacctttgctagctcattagctgccattctgtacggactcttgtagatcagagcagttccgggtgccaaatcaatccggaactcgatttctctctttagtggcattgtagagaggtcttcaggaaacacctcagtatactcttgtactataggaatatcctccaattcctttagacttttcttcactatttctgtctgatcctcaattgcagcctgattcagacttgctacagactcctgcgacactggagaaaggaaggtgatcttttcccctttgtcgttggttagggtgatggtgcgacttgcatagtcaatcacccccttgtgtctggtcaaccaatccattccgagaatgacatctaggtctttggattcgagaaggatgagattggatagaaattgtgaccttttgatctctatagacattgaggggcagtagtgtgcggtgttcatgtcatctccaggggtatgaacccgcattggtattttaagttccactacggataatccatgtgtcccagcaaacttcttggaaatgaaagaatacgaggcacccgaatcaaaaagaactgttgccgggtgtgagttgacaggaaatgtgcccagcatgacctctggtgctgcctgtgcctcctctgcagacgcatgattgacccgggcctgaacgaacctaggtctagcgcgcttcagcttcggacacttgccagcaaagtggtcatacttgccatagttgaagtagggtcctggctttcttgcagactccttcttgagctgttttggctgagctgacacagctggcagttctgactgagccggtgccattaatgggtggggagttgagttgtcgttgccctgctcacttctgtaatgactgccaccattgtagtcgttgttgaagttactcgggtagtagggacggtgctgtcagacgatcagggtggaaggcccaccctgttgtcccatcatgaagcgaggcttctgatcgttcccctgaggagtcctgatctgagctacctttcttttacggtctaatttgttgcgttgctcttcctgagggatagccttgtccacaagcttctcaaagtcctcatagactccggagatcaactggttggtcaactcatcatcaagaccaaacaaaaacttctcctacttctcagcatcggtatgcacgtcctcgggagcgaagcacgcaaggcggttgaactcgtgcaagtactctgtaaccgtcctggttccttgttgcaatgcacagaactctctcttctgttgtgccataatcctttcacgaatctgtgccttcctgaagctttgacaaaactctgcccaagtaacctccgttgcagttggacgggtcaccacatagttatcccaccaggcagaagcgggacctttcagctggtgcgtagcaaaagcaactttctcttggtcgttgcattgcagtaggttcagcttcttttcaatagcatggagccagtcgttggcctccattgggttggtggtgcttgagaaagtaggtggcttgatacagaggaagtctaacagattggacaggtgtgatggtggaggaccagactgctggttctgctgcgcctgctacaacatctgatggtaatgttgctgcatctgttgcatcatcattgtcgttatctgagtgaccgttgggttctcgggcggtggagatggaatgctgctagatacaccactggcatgtgctccatcgatctgctcttcgctgccactggcgtcgctggagttacagggatcattccttttcttcaccatcaggagggggataggtagaaataagagaaaggaagaaaacagatggctcggaaactaatctttcttataaatttaagtgcatttatctgacttgaattaaaacactgaaaaggtagcaaacaactcctaattaaggcagtcataccactgacacatgatattgaccatcgactaacccacaagcacaaacctaaacacagaaactagcaagcaaacaaaactaagaaaatgataaggctaaaggtggcgactctgaagcttggagcggcgcttgcgatcgcagaataggtctgacatctaaagtagacaagggataggaaccaatacatgctcaaatccaaattaaacaaagcaacaaatgactcaagtaactcgccgagcatgatgatttttgtgcatggaacatttttcatgaacccagacaaaagatactaatgtaactgactaaacgataaattaatgcacaaaaatacatgaatagctataatgatacgcataaaatgtccccatcgaacctagacacggcttagtgcatatcacccaacaattcccgaccgactatcgaataaattccgaataaacttttactaaaaccctagactgtccctagtcgagaaatccaattaaataagtgaccaagattttcccacaaatgaaaagaacaaaccccaaaattttcccgaaacaaattcaagtgcaaagagcatatgcagatgaaaaggtttcagagggctctttgggttttccagttggcttgtcctacggacaaggtcggctctaataccaacttgtcacgcccagaaatacacgaaccagaatttctaagctgaatgtgcattaaacccctgtccaggaccagccagggtacacacacgacaattgttgacatacagattcacgtcttacaaaacaatataaaagattacaaatgcagcgggaaagataaaagcgaactaagcctgaagacttgactcctgcagcgggtgattccattccacaggcatccttgacggcagtgacgaatccaacttcttcgagacatctccaactgagaaggacatcaactctggagtgggggaaaagagagcaagactgagtactactcactgtactcagcaagtcataccggaaaaggaggtatgatgtaggatatatccaagggaggcaaaaaggttcttttgcataaagctagcatttaaaaagcagtagttgaaagcagtaaaacggttgcagtaattaatcaatattaacaaatcaatgtccaacgctacaccacgttgcaacaggcccaagcaaccacctgaactacaccagttcaaaagctaactagggatgagactaatcacggtgaatctggtcgaccgcccataactgcgggcacggctattcgaatagttttactctgatcagaggtgtacaattgtacccacaagacacagccccacgacacgtttccgtgcgccgacatgccaccacggcataccgaaaagaggccatgacaggacccttcgcataaccccctctaatcgatcgcaccacacctcaggattcgcccccgtccccagcaggcaatgggcagcccccctctcatgccgcggtgaatccggaagccaatcaaccagacaccccggccgacccaactccatcacgcccaccctcgcctgggtacatcggctagaggaaagctacactacaagcccagccgttgcccacgctggcttgtggtaagtacgataagttcttccagggaatctcgcgaaccggtccttaatcgccatgggcaggggtagcaaaaccatgcacccacggcccaccatgtagtgtattttaattaactaacaccattgcggtggctctattccaaagctatgccattaatcaaagtctatgcattaatgtgtttccccctttgtgtactagttgaactaagcatggctaagcatttcctaaaccaacatctagtcattttaaaactcaagttatcaatggcataaggtaaacaatatatggctgagtagtaggacccatcccacatgatattgtaaaataatgcaacatttgatagaaatgcgggacatttgtaaattaggtacaacatgatcaattataatgcatgacttgccttgctctcgcattgatgagaccacagcaacgtcttcacggaaccgcggatcgacgaaacggccgaaatctacgcgacaaacaaagcacacaagaaaaacatgctataagtctactgaaacaggaaacaaaaccatttttactatattctattcatttttatgaatttactgaatggacttaatcggagctcggatgaattagatatgaattttagaagattatctgtgtttttactataaaagaaaaacccttaatcaatttattgtgcaataactcatcccagggctgacgtcatcaaggagggggcggcgccgacatgcgggacccatgggtcagaggcacaagggagagggagggggtactggcaggcggggcccaccgggcggcggttcatgggggaggaggtggcaccggccaggctcggctcggcttcaagtcggccgcccgatgatggcgatgcggtggtggcgggtggttgccggcgacggcaaccggcgcgagaagcggcggtgggtggtgcgaaaagcagcggtggcggccgaaggcgacgccacgcatgcggaggacagcggcgcacacaggagagagggaaagagggaggagaaggagttttcaccggcgggcacggcggccggcgcgaaggatgaaggcggcggcgacgacccgacgagcggaggggcagacgggcggcggttgcacctacggaggaaaatagagaggagttagtggttgggaggaagcccacggcggctagcgtggccggccagagataggaagggcagcgaaactcattggcgcacggagagagaggcgttccggcggcgggattggatggggatgcggcggccggggtagctttggcggcggcgaagctaaccgcggcggcagcttgattctgcggcggctctagcggcgacgagcggtggccggagaagtggagatggcggcgatggatgggtgcacggtgcgggagcggtggagagctcgggagcggcctgcgagtgagggaaacgagagatggcgttgcggggaagctttatagggcctcgggagaggcggttgtggccaggaatgggctctatttggccggcgacgacatggggaaggtggggagagaaagagggagagagacggaattcaaattgaatcctgcctctatgcgggcacgcgcgcgcgggctggaaggcggtgaagggggcgggcgacgtgggcggcgacttgggggggcgtgtgggcacggatgcggaggaagtggcagcgtgggcggcggttgctgccggctggaggaggaagacggggtcgacaggtgggccccacctgtcggtgacccggagagaggagggagggagacgtgggccggcccagcaaggaggagggtggcgcgggaggagtgggccgatggcgcaaaggaggaaaagaggaaaaagaaaagaggggaaaagaaaaaaagattttcctgggatttaagtattgcatttttcttattttaattgtgtaaaattatttccaaggctctgaaaattccactaaaaattctgttagcatattttgacatgtagaatccaagaaaattccacatgtcgattccgattattatttgcatttattaatttagggattcacctctaggttaaattaaatcatttctgcggacgatttattttatgaattttaaagcaaagaggggaactttagggcgtgacagtagacaaacctgtcgggtgggctccttaaggtgtgctgtgctggcatgcctacgtgtctttccacgtagtcaaaagtggcaaatagttaagaaactcccctctcttcgatgacaattttgttgggatgaatacataaagtggtatttggaaagtggtattttgtaagagtggcaaattgtttaattcgtaggagaatgaatgaattgagaaatggatcagttatggtgtggtaaaagggaataaacaggtgagacatgattgatgttagtgaaaacttaccgtatcctcagggttaaaggatgcggggtgggagaggcgcagtggacctaacaataatagcgtgtatgtagctcatagttctaattatttaaacttattctcgattataatacacaatggaattatgcatgtgtagtttattttgtttgtttgaatgtattatatttttctctagtaccaattatgtataagagggatattatttccgatagttgatccaaagtttatcaattcttcatcttctatagaaaaataaaaagatggcttgactaagctggatcaatgagagcaacgtattttgcttagtttcacccagacaacatatcaactgtcctcttgtaatatgtatgtcggcttggatcggaggcaaccagcctaaagatgggacacagttgttacaactaacaacattgtagtctagaatatggtatagtaatacagtaacatgaagctcttaaatatttctcgatatttagaacatggaacaaataatgttgttatagtataccaaccttacatgagtatagagaaagtatgtggacttccaacatggaaggacatatacatataagaggcacattatttattctgtaagtaacacaacatggagttcttgctccttgcatctcaagtattacttgctcattgccttcattcctttcatgtcaagttaatgacaaatgaagttgcctatgttagcaaagccacaaacacgaagtatcgtttggatggagaaaccattagggataacaccaccactgaacttgaaggaatcacataggcaactggcggcatcagtgctagatagactggtgatcggtggacaacaatcctgcttaaccaaactcggggagatgagcagagttgacggatcaagttttgcgcacacgttgagcgctaataccttttcttttgggcactgaccacctctggatggaggtggcggctgtgatatcggtggttgtgatggagttgctggaggtggaggtggcatggtttgtgttggtggcggcggaacactgtgcggtggtggcacccgcggcggtgtacgtgatggtgttggagctggagcgggcattggagttggttcctcgctaacaggagttggcggtggaaccctttgtggtggtggtgcatgtggaggtgcacgtgatggtgtcggagtaaggttaataggtgttggtgctggagcgggtgccggtgttggttgttcattaaccggaggtggtgatggaatcctttgtggtggtggtgcgcgtggaggtgcacgtgatggtgtcggagtaacagtaacaggggttggtgctggagcgggtgccggtgttggttcttcactaaccggagatggcggtggaaccctttgtggtggtggtgcacggggaggtgcacgtgatggtgtcggagtaaggttaacaggtggtggtgctggagctggtgccggtgttggttcttcattagccggagttggcggtggaaccctttgtggtggaggtgcgcgtggaggtgcacgcgatggtggtggagcgggtgccggtgttggttgttcattaaccggaggtggcggtggaaccctttgtggtggcggtgcacgtggaggtgcacgtgatggtgttggagtcacattggtcggtgttggtgctggagcgggtgccgatgttggttcttcgctaaccgggggtggcgatggaaccctttgtggtggtggtgcacgcggaggtgcacgtgatggtgtcggagtaacagtaacagtggttggtgctggagcgggtgccggtgttggttcttcactaaccggagatggcggtggaaccctttgtggtggtggtgcacggggaggtgcacgtgatggtgtcggagtaaggttaacaggtggtggtgctggagctggtgccggtgttggttcttcattagccggagttggtggtggaaccctttgtggtggaggtgcgcgtggaggtgcacgcgatggtgttggagcgggtgccggtgttggttgttcattaaccggaggtggcggtggaatcctttgtggtggcggtgcacgtggaggtgcacgtgatggtgttggagtcacattggtcggtgttggtgctggagcgggtgccgatgttggctcttcgctaaccgggggtggcgatggaaccctttgtggtggcggtgcacgcggaggtgcacgtgatggtgtcggagtaacagtaacaggggttggtgctggagcgggtgccggtgttggttcttcattaaccggagatggcggtggaaccctttgtggtgggggtgcacgaggaggtgcgcgtgatggtgttggagtaaggttaataggtgtaggtgcaggagcgggtgccggtgttggttcttcgttaaccggaggtggtggtggaaccctttgtggtggcggtgcacgtgatggtgttggtgtcacattggtcggtgttggtgcttgggcgggtgccgatgttggctcttcgctaaccgaaggtggcggtggaaccctttgcggtggtgatgcacgaggaggtgcacgtgatggtgttggagaaacatttataggggttggcgctggagcaggtgccggtgttggttcttcactaaccggagatggcggtggaaccctttgcggtggtggcgcacgcggaggtgcgcctggtggggttggttctggtggtggtgtggcacttactggtggtggcggtggtattgtttgtggtggtggtggtagcggcggcgggggtgcacgtggcgggttccttctgggaggtgttgcaggttgctgggccttggcaaaagaagagagcgtgagaatcacgacggcgaacaggatggcattggggactgccatggctactcgccgtggtgctcggctctttcctgcctttgaactgatgaagtatatgaagctatttataggctaccgctagccgctttgcaatgttggtggtggcttggtacagcttatggtcacaactggattggaattttgcctcacacaactcggagacttgtagcaattgctaattaatcgtagcacgtgtacacaaagcgtactgaccaattagatagcatcaatcatgcttaccttcaactatcgaacagtgagctcaaggacattttgggtcactctcgaatttattcaacatttatgggcaacatggcaggaaatgcttagatgctggaggagggaatttgtcctattggtcctatggctcccttagctgtgcatatgtacatataaatcgttcctagcagggacacagctccaaagcaaataaaatcgacgcctgttctctcacctattctccattgcatatgcatggacctgatacaaactttgttctaatttgatttacaagaaacagttcaaatcttgtaagaacctaaaatcaataggtgttccgaaagaggtggaggcatatctttacccaggtggaactccattaagttgtttgctgggtataaatctgcatgcaaatcaatataaaagatataatatttttttgaccattaattacaaagacacatctattgttagtagtgatactgctaggttgagaaccactagataaaacatttactctcccgtttcagattacttaccgttctaagttaacaagtgaagtgaattatatagtgtgaacatgtttctcatggtgattctaaaagtataaatctaacgatgtttaaagataaagatataagtttatagaatttgatggtgaaagattaaacttgtttgatatcaatgacaactaatttagaatggagggagtagtgtcttactcctttcgtccaaccattaatatatataagcatttaaattctgtaaaaatataagcatttatacactactacatgttatgttaatcacctctcatttaaatttcttctgatcttttgtctaatcatcctttcactcccaaccatatatgttattataggggggcactaacaatatttctccgcaacctaaacttttggtaaattactaaaaaaaagctttggaaaacaactgaaaatgcattatatgttggatggaaggaccttattgagggatgcaaagaatcattccataaagagattttgcgccactaaaataaaatgcacaccttatatatcattcactctagggctagttttggtataggccatatatagttgccgagaatctggtccatatcatttcgttgacacgctctaagggtcattagatactatatccatggcttaatttttggtgagtcacttctatccatgtttcttggctagtagggagtcaaatcatagacgtttccgttgcacgtcaccacacagttagccactggctcctctgacgggtggggaaaatatgtataaaaagtccatttcacaatataagttattctataacttttcacatttagattaatgttaataaatctagacatatatatctatttagattcattaacatcaatatgaatgtggaaaatgttagaatgacttacattgtgaaacggagaaagtatgaaggactgactccaattctatagaaaaatttattaggtagtgttgacttttttcataaccaacacaaaatcacccaacgatgatttacggtgtaaccaatggagtcgacaaaatcgatagataaaaccagctagctgagccaattttgaatttaatttactttcgcgtaatcaaacaactattttatgagcaaattaacaaagaagataaatattgtacttttctaacgaaagaacaactagcgtctgagcaacctccgcgctttagtggataagcatgacccttttttagtgcaaaacggcaaaaaattaaccaaattttagaattgctataagtcagccatgcaaacaaaataaaaattaacataaaaataaaagtaaagaacagaaaaattatagattgataaattgtttggggtcccttcccaataggtcatcaatggtatatataccagctgggccttaatatttgggaaatctagtcagttccacacaaaatatatctaacttcaaccgaaaacgaaataaactgatcgttatctctaactcatcaactcctatgcctaagataatcacatactcccttcatcaaaaaaaaaaaatctaggagggtatgtgacccctccttatacacatcaaaaaaaaaatctaggagggtatgtgacccctccttatacaacgaatctaagacaatcctctctgtctagattcattgtactaggaggggacacatcctttcttaggttaggaggggtcatatcctatcttaggttaccttttttttttatggagggagtacaccatttgtaattcagccaagcaacgcaggataaggtaactatacggactcccacaaaacgcgacttatttcgaaaacgcttcgtatcttatgtccgatatggacgaaactctggacggtgggacccatagccgaaacctttccccaactttatcctcattcttcggttcttcctcatccccaaccacactagcgaagttaactctcgcggcgaagggcagtgggacctgatccaggacggtgcggaggctgctgagtcggcggcacgcgccggaggcaaagagggagagtcaggtgacgagcggggtgccgaggaggacgaggccaacgagcaccatccacagctacttgcgcatgcgccgggtggaacaccaccgcccaccacaccagcacggccgcgcccaccactcccgttgccaccacgcgcgccgccatggccaggcacgaccacgtcaaccacatcctctcccccgctgccgccgctgctcgctgctgtcctcctcctcctctcgcctccacgtccaccttgttgactggctccctctcgtggtgcgccattgcgagcacactgctggtgaatatactattttctggaggggggacctaaggaaggagtcgccggcagccatgtaggtggcggcggccgacggagaagcacgaagcgaagagggaggagggctctgaggtcggcaatgaaggtgaagaggcttgtggcaacgtcgaactagctaacgaggattgttgcacactacatgtttttttgttacatatagtgtgttcgtgatgttggaattcgttttttatgtttcttaaatcagtactagatgttgcatttggtttctttgatgttccacatattgggttttactgagtgttacatttaattgaaacatcttcaataaagcggtgaaacattcttctgtgaaagatgaaacatcgagaaacaattaatgttgaaacattttttttcgagctatgaaacattacagcatttatttaacatacagtgtaacatcgtttggagatttcatgttgaaacattttttttgagcgatggaacattgcaacattcatttaacatacactgcaatatcatccgaagatttgcaaatatctggacgaccgatgcgtagcactatccgaataatttttgtacacagttccatgcatgtagcgtgttcgtcctcctgcacagcgggtcccacgtgaagaaaatgtggagccaaggaaaagatcacgcacagtccaacaaaagccatcctgcatcctgcatccagcaaatttggatggctgcatttcatctgcttcctttgcatgcatataatcaactcaagcacagttatatcagctgcatcggtacatatccaatataagccaaatgcttcagtagctagcaccaaaaaccaatacatccactactaaaaaatatttttttcctaacgctatgatttatttttctaggtggactataaaatcactgttgttaaaatagctaaaggtaccatgaaagtagtcccacctgcgaaaatcgattttttttagtcagaccacttaagagatctgcctacaaaatacaagaccttaagatgtctacatgcgacaaggttatactatataaaaatcatcacctatatctagccccatttccaccaagtcctctaacctctccttccctctctctcaccaaaaccggtctatcctcccacctctccttccctctcccacctcacactccacctccgaacaggcggcgcacgtggccccctcccctcccctccctttccctcccaaatccgacagtaggaggctagggcggcgatggcgtggaagcagcggggaggaggcactcacctctccccgctcctagatccggctggaggaggggagagcggcagcggcggcgtggaagcagcgtggaggcagcgctcccctcccttacctccctcctcactcctacatccaaccggaggagggcgagcggcggcggcggcgcttccctcccctcgctcccttcctccctctccgctgctagattcggccagaggagggcgagcggtggtgtagaggcggtgacggtggcagctccactccctccctctctattcctagatccggctagacgagggggagcgatagcaacgttggcaacgctaccctccccttgctccctccctccctctcagatctggcacacggtgttggctctcccctcccctcccacccagattaggccggggggtgggtggggggggggggagggcggtggcggtggctggcggctccccaccctctccctcccaaattatttttgtgttcgcttaaaatatttaagcaagcggatggatctagcgcctgcgaagatggagaagccgcctaccaaaatcatttttgcagactgaaggccacctgtgaaaatgacgtgttttcataggccttgaagtacaggcggggtgaatgtctgcctggaaaatttcatattgacctcttgttaaaatatgtattctagtagggattactccacatatttaaatggctcctaaaccaaccactcaacaaatttcctaaatcctaaagttagagctcactaaatcctaaaacttattatgcaaagatactccatcatcatccactaacaattaataaatttaaacatcatacaagcattttatattatctataattttataatttattaaattttatagcttttcaaattcaagcacgttaagtcatcatttcacataattcacataatatttcaatatgtctttccatcttttttatagtatcttatatagtccaacttaactcctaatttagtaaatgtgctctctctctctctcttctctcattaagccagatcacataaatatttgtgtccttaaatgattatacatggtccaaattctccgttcttttattctcttattaaggcccttcttttattcttttattcagcttaggattatgataatctagattattagaagtaagctgaaacaaacagatagcttattatgatatattattataatctataagctagattactataatctggtaagccactctaaatgtgctttttctagattattgggtgactaacagctaataatccagagaatcaaacatctaacagcttattctatgtcggcttattataatttagcttatagtaatctggttcaataatctatattataataatcttaagttaaaacaaatagggcctaagtcatatcaccccaattatttttagcccttagccacatcaacttatttacgtttgaatcatcacactatatactatttaaatttaaattatcataaatcatataaacttacataagtttatattgtctagctactttacacattacttttacttaatgctatcatactaaaccacggtagtaagacgtggggtttcacatagtattctaaataatttcgccaactaactataagccagattgtgccataaacaagaaggcatctgaaacaaaagattgatttttttttgaaaaacataagaatgcacaattatatagagattttagatagaagttaacaagagctcgaacatcttgaaattttcattttagtgtctctctcatccgattcctgagttttttctgcggtctactcaaacgaacgatcgttcctgtatttttttccgtgttttataatcctatgttgagcatttacttttgtgttaaaatcttatagcttttccattctaacgttctttttttcaaccctgtgtttcaaaatagcccagaaattttaggtcatccctgcctttgcaccattgaccatcctcttctgatggtactgattcatatatcaaccgtccattcccagcgtcgttgccttcaattaatcctttagaaaagaaagcgaaatcaggtccagcacacgctggggagatgagcaccatgtttttattttagttatttatggatgcaagtccttttatcataaaaccttgaagttgacttcagttataaccaaacaactaaaacaaactcctctgggcttcattgatccaagtttttttttaaaaaaaaatgtcggcccatcttttcaagttttaacatagaaacattttattttcatcttgagctaaataactaggtaataatatcctgggtcttaaaagagaagcaacaaattttacaatcttttagatgtaagaggaggtatatatcaaaatttaaacctcttaatgatgagtgctgaaagatactaaaagataactaaatttacactaaaaaatatataatatatatgtgcttatatagacatgactagcaaggaagcttatatgttctgcatataaatgtaatcattttggttgaaaaaataatatcgttgtgactgcacagccaaatcattcgacgtataccagtggcggcaacatgaggaaacctatcgaactagctagctagctagccatatatttttttttggtaacttgccaaaaagtttgcctaacaatttcaaagccactagtggatggagctgaggaaaaaaatattggctggaacaagggtgaaaaactacttcaatagcggtgccctccatggcgacaaagatcgcggacatggagccatgggaagacccaaaacccaaggagctagtaaggggtaggatggttgtttgttgaaaactactgcgccacacttgcatgtgagacataaaacctggagtaagatgtaatagttcggtcagctatgatgaaatgtgccacatttggagctcaatagatttgatgagagttgagtatccgtttagtttgtgttagatttgtgacatttttcttcattatggtatctctcatttagaaccaccctaactagcatgagactaatttgcatacttttgtgtctcatgatgtatgagagctaccataataaagaaaaatgtcacaaatctaacacaaactaaacggatactcaactctcatcatacctatcgagctccagatgtggcacatttcatcatagccgaccgaactattacatcttactccaggttttatgtctcacatgcaagtgtggcgcagtagttttcaataaacaaccatcctaccccttactagctccttgggtttttggttttcccatggctccatgtccacgatctttgtcgccatggagggcaccgctatcgaagtagtttttcacccttattcgagccaatatttttttcctcagctccattcaccctttgctgtttgtgctccgatctccttcaatagtagccaccattggccgcagagcaacctgccgatgctgctgctgctgtttgtgctcagagctctgttctatcttctgcaaaggatgttaagatctgagttgctttagtgatttgttcaattagttccaaatagttagcttctaacagctatgttcagttgatgaaaatcactaaaaatattaagttgaatgagttttgagaaaattttatagactataaactgtataattaatacctgatgaagccaattttggaggttcaattttagttgttgtgaaaagaacatgaggatatttaactggtggaaaactgagacttgtttcggtgccaaagggagtgaaactgaactaaaagaaaaggataaaaacatgtataaaatatacctgatgagatttactgttgtcaatattgacgaccatgtttagtcatatatacttaagaatcaatttacactcaaaagctaacccaaacttcttcgtgcgatgcctctcctcaacttttcatatatatttgccacatctccaattcatttaatttcctgtttgcttgctgataaacaacataagcacttttagcatattgctaagtcaaatatttgtaactttggctattaatagcaaaaatgtaaaaaagatcaatcatgtaaaattgatattactagatttatcattaaacaaactatcaaatataccactctttttatttaaaactaggaagatagcccgcgcgaatgcgcgggcatgtatcgtagactatgtttgagcatctacaatatatgatttctccaaaaattgttttcattagcattgctttataattttctaacctagctattagttatttttataacatgtcatatttaattaatccctacaagcaattatttataatattcttcatcatctaaaaagtaggtagacatattttgtgttagaaaacatgtattgcaaattaagtgtaaattcaaaagtaaggtgttttttaattgaatgtaggttgtcattgtttgttgacggatgaattgggtgggatatgaggctccactaaatgcatgggtttatatagtctaatattattgtttagtttgagagagaatccatatgtgaacattctatgtagagtgtgggtgagactccatgcaacttagcatgaataatattggatgaagaaatatagttgtgcaatatattattttggaagatgatgtattatgaatacacacttgtcttttaatatgagataaatctaatggctggaaataatgggttcatcagtttaaaaacgcctaggaggatttatggggtaacatgtagagactttatataaaaaagaaaccatcatcaaaaatcgattagatgatatataaaataaaattataagtgtagcttaaaattatggtctttttaatatttgtttctctctttagtttagtagctgaaaatagggaggagactggagaaaaacgaatagcatagaactcgaatcaggtataagaaagggttcgcagtgtaatagtgttatgtgcatgtgattggagaggcaggtggagggtacattatttttttttcaatctttgtaaacaatctaagtgagaacctatgatttgttgttttctcattgtaaggatctttaagacaagacatgtggtggcttaagtttttttataaagacaaaggtgatctaatagttaaaaataatgggtcatcaaattaagtggaaaccaatgtatagatatatactcccttcatccacacatattacttttatcaccaaaaccaagaaaatattaaatcatcttggatgttataaaatcaaggtgtaaatgcaagcatgcaagtatgcaactaatgagtatttagatgactcctccagttctaatcaaacattcagggaaaatttgaaccatgccacataaattttgcaaaatttatgatatgccaccctgacccacatgttattgacttatgtgggacctacatgtcattgagatacgggtggcatatatcaaattttgcaaaattagggtggcatggttccaacaaaccctttaatttatctcttcatttaagtcttaaatacataaagactataaataggaacaacttatttggaaaaactcaaatgtgaaatatgtctaacttttgtggatggagggagtactttatttttttctttgaatttcaatttttttcaaagttttaaaatatcatacgtggtgacttaagagtgctatagagcacgtttaattgatctttactatgtaaaacgattcaagaatatctaatatgcgttgtcatgttttttaatgttttgttgttatttggtaaggagattttttttattgaggtagatttaatgcgttcatctgtttgaattatttatgtctttaaatccaatttttaaaattataactccactgatttaaatgaaaattgatgaaattataagtccaccaatttaattgaaaattgatggttagatttgttttcttcataatattttttataattaaattttttatttataaaaaaggaaggtgagagaaagaattattgaagacggagaaagtgtatatatgtatacttacatgcgtggggtggtcggaagggtgggccagtggggagaggagagttatgccggtgggagacaggcgatggatgtggattgtggttttttttaagaaaaaaaagataaatctaatagtcgaaaatagatggtttaccgatttattataattccacgtggcggtttagttgtgtttataggcgtaccacgtggtagtataggagtgtttgtatacctttagtatataattttttttatttttaaatggtaattaggatgacatgccctagaaattattcttttccgtagaagtttaccacggttgaatcattaagtattttaaagacaccatggatctaaatttaaatatgttcgcaaatttgatgattaagataaatctagtagagcttagcaggatgaaaacatgtgcacaccctcatttgtagcagacctaatgctaattgcattgataatccctagcaagaataggttagtctatttggataaccacattaaagcaagcagcacgcacgttgaaaacatattcaacgttttgatttctctgcatctttatggtttattatactccctccatttcaaaatgtttgacgccgttgaccttttttaagtcatctttgaccattcgtcttattaaaaaaatttaagtaattattaattcttttcctatcatttgaattctatgtatatatatagttttacatatttcataaaaatttttgaataagacgaacggtcaaacatatttaaaaaaatcaacgttgttaaatatttagggacagagtgagtataatttagtaacttaagattttatatggggttgctagcaataaagtaggaaattcacgtacttaccacagagagaggagtacgtatatatagagagaggagatttcttttttattgaaaacagatccttgagatatatctaattgttagaaataatagattcattgagatatatctaattgttcgaaataatagattcatcggtttataagttataacggatggtcagatttttttttcttttttctcataatttcaaagattttttctaatttattagagtgcgacatgacagcttaggagagtatataggatgtcacgtggtgactaaagtgcattcgtaggaagtttaatggacttgtgcgtagaatacaacttgaaataacattgtatttttttacaactattagctgaaattattaatttggtttttatctctcatgagtgaaaaaaagaaaaaaaagaaaagaagggaaggggggacacgtacgtacgaattatatacgtacatgcacgtacacgtacggatggatcgatatagaacgtggtgctttctaaatataaatctatttggtatttttttagttagatgtaatggttggaaaatatgggtcccccagattaaatgaaaatcaatggttagatattttatttttttcctagaatttctctaatttattagagcaccacttggcggcctaggagcatttgtagggatgacatgtggcggcttaagagcgtttgtaggaagtttaatggacttttagtatataatagaagatagatatcttacttttatagatatcgttggttaaagtagcatctcaaagactgtgtcgatgtttaaaaatgtgcaaaaggactttactcagtcactagcacatacgtaatatacgtacacataataagtggcaattaagcaccttgtgtccactacggtggcagaaattttccaacaatcaagttggtaccatacggtatgtacaccaacaacattacactgtagtagccacttgatcgatgccaaataaatcgattcagacaagtcagaactttcagagcagatgatcaagcagtgatgaacagtgagctcatgtggccatttgagagcactctcaaattaaattcaacacctatccacgacgcggccgcaaaggacagatagcgcacagacataatttgtcttaaactgtccttgtgccatccataactacacacatgtgcacatgagtacatggcctaattttgtgatatatagtggcacacgtgtggttaatgaaaccagtttttctctgtatcgtgctggccacccttgcatgcatgaatttggacgataatccgttttaacttcattagagttctattagacttccgtatacgtggttatcttacagttgaaaatgacatccttatgccatatgtctccggtcaccccaggatttttatacacggttttcagaattatattatctccatcccaaaatatttgtaacgtgggtatagattaattagattgttagtgctacaaatctagagatagagtttgtttaaattcattgtaaacattgtatcaaatatatacctagctagatcattatattttggggcaaagagaatattttctactatatgcaattatttccagtgtctacatgcatgcagtactaatgagcatcgtaagttcatttttgttggttaatgctgcatattttgtaaagacatagtatcaattctgtctcgccgtgggcatagctgctcaatgatcaaagggccaagacgaattcatagtcccaggaatgaacatccaaaataaatgctgtagctttctcctgtcaaaaatataaattaattaactcgatcgatataaaagctgaattgcaaattttttaaataattagttgtagctttctttaagtaaaggtcaggatttattttattactaaaaataaaagctgataatataattgaaaccggagagagtaacgtttccaattcctttaattttctttcctaatttctatgggaagtgaactttataacgttaatgagaggttagaaagcatagaagacacagatgcacatgcaagaggcgaaaccttttgctttatctaccttttttcgtatttgtgtatgtactaaatatgggaaatatcaatattccggccactactataatcacgatttttgcgtgcagtggaaacttatttttgtgtgcggtggttccgcccgtctggaatccatcgtctgccaaaatcacgattttttcgtacgggtgaggcaccgcccacgaaaatcgattttcgcggtcgggcgcttaagccgcccccacggtaaaataaaaaatcaaaacaaaaaaaagaaaaaaccaaaaccctaactgccgccgtcgtcgtcgccctcttcccacgccggatccacctcccgctcccgtcgccggccaaagacactcctcccctccgccggatctgcaaggggagggagtggccgtgtacaaccgtcgtcgcccgccaccgctgtcacctccgcttgcgcccaccaccgccggatccgccgcccccatccctcccctccgctggatctgcaaggggaggggaggggaggggaggggagccaacgggagagggagggaggggccgccgcgtgctgtcgcccggcgccgctgctgtcgctgctgtgaggaaaggagaggccgggagtagagaaggagtggagtggtaggagaggagtgggagagttaaggagtgaggatgaggattatttttgtgtgcggggctagtaaagaggcccgcacggtatttttgcgtgcggttgagtaaagtggcccgtacgggataaatgtgttttcccgtgcgggcgacagcatgttgtcggtcctccgattatcccatgcggtgccaattatgtcccgcctggaaataaatgggtctagcgtcgaggaaaatatttcgtgtagcagtgtgcgcagcaataaattaagtaacacacaaaggaaattgccactgcaaatgcacgtgaatcaggaaaaggtaatctcgggagacagtacgtgaatcaaatagaaattacgccttgtatgctggaaaaccagccaaaaaattacacgccccctaatctgggatggaaggagtaacatattgctaaagctctctgtataattgataaaaatgtgcataaccgttgtttaaccagcggcttataagttgtattctcatgaaaaaataaaatctctagccgatgcttgctaattttcagaaaactagatcaccccacttgcataagctttaatttgttttaattgtgctaacatacaatagaaatattattgatttgttcgatccacacgctactgaaatattttcaatgtactgttgggtcattgtcaatgagctgtagtgctggaatactaagaaaagaacattgtgaagcactataataagtgaattgcttgaacctatttccataaatttaagtttcgatcattcatctctatcataaattaaaatgcatatgacagggaaattcatcgtatagttatccatttcacacatctcattctttttctcacgcgcgcatcaagaaaacggtataataattaattaatctatattaattatggcacgaagagtacttacccttttgatagtggcaagttgtcaaccagttaagcatatgttcagctaagaaacagtgagctcacacggacgtcgtttgacgtcagctctcaaaagatgacgccgctacttggatcggatgttggagacttggagaattttgtcctactcaccccataactgaacatgtgtgtacagatgaacccggccgtttttagcagtgacatgcacacacacgtgcaaagcaaattaaattaacgagtatccttctgccacctagtccctcgagtagtatgtactttatatatatgcatgcatgaacctgattaaaattttcttgtaatttgatttgctgcaaacatttggaaagacatacagacttactggaatttagaaatgacgataggcaaattttagtagagaacactcaaatttcgtggaggataccggtgaacatcataaaaatgtgctacagcttgtggagattatgggtatcccatatctacacggcgacggtatttggattgggtaccggatacttaatgtagatagaatatcttatctgtatctcgggtttgtttcttaacttgtgtatcaaggaaacaccctgagatttagtcggttacgactgtattttacctgtatcttcatattccgttaggaatatagattatcttttgtaatccggactccttcccatatataaggggggtccgggcgcctctaggggcatatgctgattttttcccgaatcacacaatcaataatacactcggcggattcatccccggacaggagtagggtattacttcttttataagaaggcctgaacctgtataaatcttttgtctccaaacccatacacttttccagcttgatagccacccccttttattattgccgaaatctagtttcgacagttggcgcgccaggtaggggtagcgtcaagcttttcgccgatcagtgcaatgggtccttcctccggcatcgacgacctcgtcttcccacccgggcagacgtttcggttcggcagcctcgacttcgtcaccgacaatttcggcaagatttctctccttgacttggaatcggaccagtcgggagagaaccggatctcagtcccgtttggattcccaaacgcggctgaaacctacttcaagaccatctcaatcgagtcggcttcaaaccactcggctgagatcgcatcttctccaacgacaccagatcaagatgatggggcttacccaccagtcctgatgaagctccccgacgatttagcggccgtctccaccacgacagcgtcttcatcccgtaggcctatgcggaagtcggtctcaacaccgatttcgcctagcttcagggaagtcggcgtcatcctccaaccactcggcacggtttcgacggatcagctagatgaccactacagctctcccaccgtcgactcgcgccccaccgacatcgtggagtacgatgagtttagctctcgctaccacgacttcgacgacttcgacgacttcgacggaagcctagatgacaactacacccctctctactttggcgttttcatggccaataatgagacggaggagcaacgccaagcccgggagaccgaagaacgtcgccgactggaagaggagcagcaagcacaagaacaggaacggctacggcgtgagcagcaggaccgtgagcggatcgccaaggaggctgaagatcgacgtcagcgagctttggaagcagggcgccgagcgcgtgatctcatcggccaacaagacgtcgaagggacaccggttttccgcacccctcaacagaatgcggttgccgcgatcacccttctcgacaccctcctcaaccaaaacgagctcaatcgttccgaccacgtcgtcaacatcttgaaccagacgaagaccatgatcgcggcttcggtcccagttaactccgaaagcgtccacacgccgactggcagccgagtcccccacttccgatctcaggactaccgtcatccaagcctcagcatcaccggtgcaggatccaatcgcaggagcaggggtcacgacgagcggtccgtgcactcgcctcccgactaccgtggggagcgccgagtagaacggccacgttcaccgcctcgtcgccgccccatcgatcttcgcgacacaatcatacagcgccgagcagctcgaggccgtcaccactcgccagaccgctacgacgacgaccttgatggggtagcagccttcaccgacgacctgcgtcgagtggattggccagccggcttcaaaccgactggaatagagaagtacgacggtaccactaacccagaatcgtggctcaccgtctacggtctcgcaatccgcgcagcaggaggagacaacaaggccatggcgaattatttaccagtggctttggcagattccgcccgatcttggctccatggactgccccgtggtacgatcggatcttgggccgaattacgcgaccacttcatcgccaacttccaaggcaccttcgagcgtcctggcacacaatatgatctttacaacgttatccagaaatccggagaatcccttcgagagtatatccgacgattttctgaacaacgtaacaagatctccgacatcaccgacgacgtcatcatcgccgcattcaccaaagggattcgccacgaagaattggtcggcaaatttgggcgcaaacctcccagaacagtcaagctcatgtttgaaaaagccaacgagtacgccaaagccgaagacgccgtcaccgcatcgaagcagtcgggtcccagttggaagccgaagaatacgccggctacgggaggaggtggaagtaacaatcataaggaccgcaagcgtaagcctgaggaacttgttgcaaccgccgctcactcttctcgacagcgttcgcgcgtcaacaccttcgacaagatcatgaactcccaatgcccgcatcatccaaactccaaccacgtggccaaagagtgcttcatctacaagcagttcgcggagcagtacaccaagtctactcggaagaactccgacgaggaacaaagcacgtcaaggaagaaggacgacggcgacaccccggctggatttcaagaccaccgcaaggagctcaaccatattttcggcggccccatggcttacgagtctaaaaggaagcaaaagctgaccgaacgggagatcaatgctgttcagcccgacacgccccaatatcttcgatggtcagagatcgcaatcaggtttgaccgctcggatcatcctgaccgagtggtccacccggggcggtaccccctggtactagacccagtggtccgtaacgtcaagcttcgcagaaccctcattgatggcggcagtgcactcaatatcctcttcgccaagactttggatgatatgcagatccctcgctccgagctgaaaccgagcaatgcgccttttcatggagtaattccaggattatccgccactccactcggccagatcacccttccggtcacttttggcactcgggaaaacttccgcacagagaatatcagctttgaagttgccgatttcgagacagcataccatgccatactcggacgcccggcgttagccaagttcatggccgtcccgcactacacgtacatgatgatgaagatgcctggtccccgaggagtcctaaccctacggagcgacatcaagcaagctgtcacatgcgacaaggagagttgcgacatggcccaaacccgcgagatggcgtctgcccgagaggaaatccgactggctgcaaccacggtgagcgaaggagaagtgcccgctgccaagatttcaaaaagtggggaaactgaagccgagactaaaaagattcccttagatccttctgatcctaccaaaactgctgtaataggcgccgagttagattgtaaataggaaagcgcgctcatcacctttcttcaaaataataaagatatctttgcgtggaaaccttcggatatgcccggtattcccagagaggtgattgagcactccttacatgtcaaagaagacgccaaacctattaaacaacgactccgccgatttgcacaagacaggaaggacgcgatcaaggaggaattgaccaagctgttagcagcaggcttcatcaaagaagtccttcatcccgactggctggcaaacccggttctagttcggaagaaaacagggcaatggcgcatgtgtgtcgattacactgaccttaacaaatcttgcccaaaagatcctttcgggttgcctcgcattgaccaggtagttgactcaaccgccggctgcgagcttctcagttttctggattgctactcggggtatcatcagatccgactgaaggaatccgactgcttgaagacttcattcatcacgccttttggggcatactgctacgtcaccatgccgttcggactaaaaaacgcaggagcaacttatcaacgcatgattcagagatgcttctcaacacagatcggccgcaacgttgaagcctatgtggatgatgtagtcgtcaagaccaagcaaaaggatgatttgatctcggatctagaagaaaccttcgcgagcatccgcgctttcaggatgaaattaaaccctgaaaagtgcaccttcggagtaccgtcagggaagctgcttggctttatggtgtctcataggggcatccaagccaacccggagaaagttactgctatcctcaacatgaaaccgccaagtacccagaaagacgttcagaagctgactggatgcatggcggcgctcagccgatttgtttcaagacttggcgagcgggggatgcccttcttcaagctactgaagaaaacagataatttccaatggggacccgaagcacagaaggccttcgaagatttcaaacaactcctcaccaagccaccggtcttagcttcaccacacccgcaggagccgttgttgctgtatgtatcagtcacctcccaggtcgtgagcacagtcttggttgtcgagcgtgaggaagaaggccatgtccagaaagttcagcgaccaatctacttcgtcagcgaggtcctggctgactccaaaacgaggtaccctcaggttcagaagctgttatatggtattttaattactaccaggaagctgtctcattactttcaaggtcactcggtaacggtggtcacatcatttccactcggcgatgtactgcacaaccgcgaagcaaatgggcggattgctaagtgggctttggagttgatgtctttggacatatcattcaagccccgcacttcaatcaagtctcaagcgttagccgattttgtcgccgagtggaccgagtgccaagaggatacccccgtggagaaaatagagcactggaccatgcattttgacgggtcaaaaagactttcgggcactggagctggagtggttttaatttccccgaccggagaaagactaagttatgtactttggatacatttttcggcgtctcacaacgtcgccgagtatgaggcgctccttcatgggctacggattgcaatttccctagggataaagcgtctaattgttcgaggtgattcacagctggttgtcaaccaagttatgaaagagtggtcctgcattgacgacaacatgatggcatatcgacaagaggtacgcaaactggaggataagttcgatggacttgagctcagccatgttcttcgacacaacaatgaagctgccgatagacttgcgaactttggatccaagcgcgaggcagcgccatctgatgttttcgtcgaacacctttattccccgacagtacctcgcaaagatgctactcaagttgcggacactcatgacatagctatggttgaggccgactggcgagagcccctcatacgatttttgacttctcaagaactccctcaagacaaagatgaggccgagcggatttcaaggcggagcaaactttatgttatgcatgaagccgagttatacaagaaaagcccttcaggaattctgcaacgctgcgtatctttagaggaagggagacaattgctgaaggacatacattctgggatatgcggaaaccacgctgcagcgcgcaccattgttggcaaagcttaccggcagggttttttctggcccactgcagtgtccgacgccgacaaaattgtgcgcacatgtgaaggttgccaattttttgccagacaaattcatctaccagctcaagagttgcagactatcccgctatcttggccgtttgcggtttgggggctcgacatggttggcccgtttaaaaaggcagtcggcggttacacgcacctcttcgtggccattgacaaattttccaagtggatcgaagctaagcctgttgtcacgattacagcagataatgctcgcgatttcttcatcaacattgtgcacagattcggagtacccaatcggatcatcaccgataatggcacacaattcaccggcggagttttcaaagacttttgtgaagactttggaatcaagatttgctatgcctcagtagcacacccaatgagcaatggacaggtggagagggccaacggcatgatacttcaagggattaaagctcgagtttttgaccggcttaaaccctatgccggcaaatgggtgtcacagttaccatcagtactttggtctttgcgtactacgcccagtcgggccacgggccagtcaccttttttccttgtctatggggcagaagcaatgttgccaagtgaagttgaattcgagtctttgcgctttcgaaatttccgtgaagatcgctacgaagaggaccgagtggatgacttgcaccgattggaagaagtccgcgaagcagctttgattcggtcggctcgatacttacaagggttgcggcgctatcataattgcaatgttcgatctcgtgcctttttagtcggcgacctggttttgaggaaaattcaaactacacgagatcggcacaagttatctcctttatgggaggggccatttattatctctgaagtcacccggccaggttcttatcgactcaagcgcgaagacggtactctcgtcgacaactcttggaacattgaacatcttcgtcgtttctacgcttaactttatcattgtatttccctattttgactgtcaaacatcaagttttctccttgaagttgtcagtcgggggctattatcataataatggagtgtgattttttatcaattcagtttgcttacttggtttatcattgccttgtttggtttttctacttagtttgcgaggactgaaagtttttaatagcttctttgggttttaggctcaacaaagcttagcaaaaacttttaagaaatcaaaaacttcgcaagaatcatcaagcacagcataaatacaccagtattgtacaaattgagcctccatgtattacattcaaactcagtcagaatcagtcctttcatcatcagagtcttcattactcggctggaggtcgttgttgcgaaattgctctacaacatcactcgcaattttgtcagccgcattttgcgcactgctgataagatcaagggcagcttcttcacttgtcccgtctgcaaatccatcaatggtgtcgacttcaattctcgggtacaaggattttgtcatcgccaaggccatgctagctcccatacttccagctttcttgatattcttgaaatatacttccggagcaacactcagcttgtcaaatatttcggttgcgtcgagtgcactcggaccaccattattgaggaacatggcttggataattggtgcagcggcattggcgacgttatcccttgctccttcaagcctcttgatcttaccaaccaggacgtcaaactgagcttgagatttgatcttgcgatctgcaaaacacatttatgatgagcatctgttgcattataaggagagaagctcagattgttagctggcgttaccttcgacttccttcaaggctgagtccctttgcgcagccagttctgtcttgtctctctccagggcttcaatttgcttcgccatctgttccatcctggcggcttgcgctgtttgaaatccagatggttgaggatgcaattatgacagcataaatcaatggaacagatctggatgattaccttttgatgaaccacttagttcgaagtttgcatcctggagctgggcgattcggtcccttaactctttctctgtctttttggcgcattccttggcctcatgcagctggtccctaactgcttctagagttcccaaatgaggaaccagcttttccaaagttgtagtcttggcctcattgcgaagatggattctctgcacgatggatcatggttcagttctgctaaaaagaaaacaaagttaccgaaggccgtcactcggaagacttacatttacaatacgagtggcttctccgagcgctttcttcagctggcacacttcttcatcttctttttgacggtttatgactatgccggcggcttgtgagttctcgtcccaccatttgatcaagataggaggacgagagtcgtcggtcgcctttatgcgagggatttcttctccgtcatcacctgatggtcctgatgtgtttccaagacattagatggatacattgaggttatttaaatcgccattgtttgagaagacaactaacctgaagatgtacctagctgagcgtgaggtgatctttgttctttacctgaagacccagctatcgagtcgttaccagcctctggtccttgcgaagtcgtcgtctgcgcttctacttcggggatctcttgatcagggcctgcgtccgactggtttccagtcgggggctcttgagttgttgccgtttcagttgttgccgactggtttccagtcggcggcaggtcactcggattggccctatcgcccgaagcatgggcgccagtcggctggctttcagcagtcggctggttttcagcagtcggctcggggtcctgggatatattttgctctgtcatggcaggatcggggtcttttccagatggatctatatcagatggtttcctgcagagtgttctttcagtatttagcattattttcatcggaaaacatgccgaagcggaaatcataccgagagatctaatacctggaagatgttctgatctttggcattgcacggccagccagttttttcctgggcatggtacgctttgggggattattaggcgagcccttatccccagatttatcatcgtcgccttcatcatcatcaagtaccagcttcctcttgcgaggacctgtttgaccagtcaatttggaggtctgaggttgcggatctggtctgatcgttggccctccacctccctgagcggtgtgttggcgaggagaccggcgctgagtgactggtggatctgacttcatcaatgcatattcctgaacaagatgcttccatagttagtcaactcagcgtgaagataaaattatgttctgatcacggtttgagggtttcctatgcatacctgtggaggcggattgaatgcattatatggcacaactggcagttggtgagagtagctgactacaattgcatttgagaagattttatacatcctctctttcatgattttgaaatccagggagtctggttcttcacgattgggatcatgtttgccgtcgaactcgaatgctgtgcgggatctttccttgattggcgccagtcggcatttgatgaagtgccgagtgatctgctctccctgtaagccttgttctttaagatttaacatacgatccaacaactccaaggcttgtactgcttcatctccgattggaagagagttccaagtatcttggtacactggaggaagacaagagtacccgggaagagcaggctcgggattctgaacgtagaaccagtttgcatgccatcctttgttcgaagtcttgaagggcatcgagaaatatttttggctcagagttccccttagttggaatcctgcccccccgactacacacggtttgttcttgtttggttggggcttgaggaagaagatccggcggaatagggcaaagtgaggtttgatccccaaaaaggcttcacaagcatggacgaaattggcgatatgcactatggaattcgggtttaggtgatgcaagctgattccatagaaattcaagatcccgcggaaaaattttgaggtcggaagagcaaagccgccgtagaagaaatgcgagaagaccacaatctcatgagtatccggagacgggaaagtctcaccgtgcgctggtcgccacccgatgatctccttggcagggagaacgccgtgcgccaccatctccttaagattctcctccgttacgtcggatgacgcccattggccttcgaagctttctctctcttccgccatcggtttcattcaaatgtgctgatttgattcgagggatggcttgggagaggtgagggattgaggcggtggatcacgggaaggattttgatgcacttttcggaggtggatttggtcggagttgtgaaccctagttcgccggcgcagctttgcactgtagcagggagtggggaaaatggcgagagttccggcggggaagacgaagcgtcgcttggatatcggatttttcagttaagggtatcggaggtgctaatgggcctaggcctgaacagtacttcagcccaatacttttaacagcgtggcccattgtgttccttagggacttaggcatattttgctttggcaatattatgcgcacaacagtgttgcccaatgctgatgaaatcctttttatgcggtcatataattctttggaattattgcaatgcaaattaaaaaggtgcccgacagaaaggcgttatgctgtttttgcaagcttttttaggctacaaaagctgtttgggttaactagggatgacttgtttttattatagtcatttccttggcgtgttatatgcctgttttcatggtaaatagtcatggcctaggctattcgacttatttattaccataatctttataatacttgatgggtaatctttagagtttttatattcggatgcctgtcgagtgtgttcattcgtgaaccttttagagtgtaaaccactcggatttcttttattgtggctaaaaagcagtcggctagcatgcctatttaggcgccgcgtatgcttttgtcatataatgcacaattgtgttattattttgtctttcaactatatgtttagtttgttaactaatcacatagttggaggctacacctaattaggtgcatctattcgatgcaccatattctttatcttttcgccctttacagtcttcgtcttcgctactcagcaggccttggcatgaaaagcttgaagcactcggattactatctttgagaaggctatgatggtcgactgcaaaggactcgggggctactgtggagattatgggtatcccatatctacacggcgacggtatttggattgggtaccggatacttaatgtagatagaatatcttatctgtatctcgggtttgtttcttaacttgtgtatcaaggaaacaccctgagatttagtcggttacgactgtattttacctgtatcttcatattccgttaggaatatagattatcttttgtaatccggactccttcccatatataaggggggtccgggcgcctctaggggcatatgctgattttttcccgaatcacacaatcaataatacactcggcggattcatccccggacaggagtagggtattacttcttttataagaaggcctgaacctgtataaatcttttgtctccaaacccatacacttttccagcttgatagccacccccttttattattgccgaaatctagtttcgacacagctaaagaacacctaaaaaacaaaaaaaaatagtaatttggtttaggacactttcagctaaattgaaagaaaaacttcttaataaaacgagaatgcccctaaagcttctaacgtgccgttggagtgaaaatttagaaagtaagtaactctcaatctcccatcaacctagtcccttgtattttatcttcactctagcatcaggtttgtggcttgtggctctataattcatgttttttttctcaacagtggctgtgatactttttacgaagtccactaacaaattacacaaaatttggtgctccctataggaaaatttgcaatgatgttaactgttgatttctatgttataccacgagtagaaaaagttatagctattacccgtaagtggtggtattaaatagttactcctccgtctcattttaagtgcaaccatgagttttctagtctaattctaatcgtccgtcttatttgaaatattttttatttgtatttttattgttattagatgataaaatatgaataatacattatacatgacttatgtttttaaattttttaataaaattttaaataagacggacgattaaaattggacacggaaactcatggctgcgattaaaatgggacggatggagtatgagctagtaccatatatattaaaaaaataacggtctaaattgtttgtagtagatacaccattgtaaatgatctttcatatgtgtgcacatatatcgaaacatctaatggagctactgctaggtggagacccgagatgtgcaaaatttgtactttctcctacaagtttcttatcctcactcagacctaaaaagggtttcttgttctctgcaggtgtatttttttgtcgtttggggtgaaaaattttagatagatagctttagagcattctattagcaagagcatatgactctaaaaatattggtcagttatcagagattgctccaacatatcgatggttcgacaagtcgagtagataagagtctgaaattaaaggatggccaaatgcaccgcgctgctgcggagttaattactaaaactttttttttctcgtcaaactctcttctacagaatgcttgcttaattctctaattcccctttgctccggagatgacaacgctatggtttttgttgattggttgataaacgaagtagagatgatatagtccaatgagacgattaattgatatgatggtacattccactattcacgtgacccgagcataaggcgccaaaccaccaatggagatggtggagtacggtgggtggagggagggcgtacgcaatgattttattagatgtgtaaaactattagtataactaggaaggtagcccccgcgtgcatgagtcgtacgccaagtttgaggtatttataaaagcgacgtattaacaggagaacatctgccacgatttctccataaattatttttgtcagcattaatttattctttaataatattttaacctattagatttatattatatcaaatataagtagtatctataagtaattatttataatattcttcatcattttaaaaaaaaggtagatttattttctttagaaaacatgtcaacgaaagtaaaagtaagtgtaaaataaaaattaaggtgtttttattttttttaattgtataatatattatcataatatgttaaaggatgaattgggtgggatattaagctacacgaaaaatgcacgggtttatataatctaatatgattgatatattttgagaggcgatctacctatgaacatttcatgtagagtgaatgagaggctccacgcaacctagcaggaatacaataacgtcgaaatatcattgcactgtaatatttttggaatttcatgtaccataaataaacacttgttaaaaggtataggagcgcacacatgcatgttatgcagtgagccagacagagattctgatagactttgtttttttcccaaaagatagatatgatgttataaaaattgggtccatcggtttaagtggaaaccgatggtcgattatatgagtgttttttaattaatagaatgccacatagcgacttagaagtgtttataggagtgctaggagcaatcatatgtatgatttagatgctatgatcattttaagatcgtttatttatcttttaaatttaaaatatcatttatttacaaaagcatcaagatcaattcgtatatgtaaatagcccccacgtgtatgttgtgagaaattaataaagtttttttatgaagaaattaattaagttggtagaaagtcattagatgtctaacaatgtacttttaatgggttagtttcattaaaaaataagctagcatattttgattttcaatgacaaattttaatattttcttttatttagtggagcactcaagatggatgtaggtctagaatgcaataaatccaatatagatgttaaaattatatatttatttgaaaaataaaaatagatatataatttatggtacaaataattgtaaagactcgtaaaattaatccggcctttattaaaaagtctaaaatagcacgtttaagtataaattagttaatatatttctttgttagtttaatgcgtacagaatgtaacggtataaactttataaactttatttaaatagtgtatgatttgaaaataatgctccacataaaggtttcacgtatacctttatttaatgggtaaaaatatagtggtgtaaactttattttggaaagaaatatatcataatataatcatataagttatgattatataaaatttaactattttaactgttatctcgattatatatatatgaaaagaaaaaggagggaaggagatggaaccgtacgtacgtacgtacctacggatggtgtggaattgtacgttttaagatcaatatagttaatctgacggtatctactagtggacccactattttaagtaaaaatcaatggatagatgcttttcttttttctcagaatttctttgatttctctaatttattagagcgccaagtggcggcttaggagcgtttgtaggaagattaatggatttttagtatataatagatagatagatataagaggataatttctccgtccagttctaaatttatttttagcttcttccatttgtctcaaaataaatttatctctagagtaatcattgcatcggagttcgtaatagtaaagactaattgtactaagagtagataatgcaaagaatagttgcattgggatttgatatatatagaggtattctagtttttttttattggtatgtatgagatggataaaaaataaacttattttggagatagtactttgataaattttggactttctaacgtcacatagagtgttgtacccaagaaaaaaaaagtcaattttattaacccaaaatcgcaacaaaaacaattccaaatttccagaaaagtttggaagtccaactcccaaaactgcaaaatactgttcgaaaacagtagaaaatactgttcaaaatttctatttatatattactactatagtagctgtagcaatcaatctcgttcgttcgctaccaatcggacggttaaaaatatcacaaagttgaagtactgtgcgcctctgacggttttgtcaccatcagaggatctcattccacaggtgcgagcatggtgatgcgcggtgtgtagccatgtgcgcaagttgtcgtcatggtatgtatgtgctaggtagcatttatggataacatattgaaaattttggtattaatagtgtcgtctctacagctgtgcaaaaaggaatgtccagtaaaaagttaaataccacgatggaaaattaaacactatcggagtgaaactcccaaattcaccaaaagtataggactccacctcccaatcaaaacccttcgtcaatatctccccgcctctcaactcctcaaaattgaaattttaatttacactacaacagtcacccacatctcaatcgggtggcaaccctcatctgtgtcgggtatgacgcccgtcacgacgtaaaggtcactgatgtgagactctatcgaggataaggctgtcacagataaagttatctttgtcgggcctaaactaaagtccgtcaccgataggtttcacctagacgaccagtcaaacaaaacccgtcaccgatgacctaatctcaatggaccacaattaatgcccatcacggatgactacaatcccaattgggcttaaactaaaggccgtcacagatgcctcaactcaatcgggttttaacttatgcccatcacagaggaggtcatccctattgggtttaagttaaagcccatcatcgatgagtatttccccaaagaaaaattaattctgtttttttgctagcctcagacctttgctagtcatgctcactgtaaaatgacagaaacaaatatatttcacaatatcccatgatccgtgacaggctcgatttttatgcacatctagcatgtatgtgcgagtatatctttgtcggtctcttttttcggcccgtttaagatgacttcgttgtgacggcccacaaaaccctggcatgtgaggggcatcacagatgagaggatctgtactaataacaagtcttgaaccaaatatttaattcctctctttttccttcaaagaatttttccttaaaaattttctaattgcaaatacgtccggaaatccttcattgaactcctagttttcacgttttcaaaaacatcaaattggtatttaaacctcagcataagtactcaaaatccgttcaaacaatttctctctctctcattcacgccttggcccggcctgctattttcccttttcattttcctttggaataagttcacttgaggtcccttagcttgtcaacgaatccaattttcatccttcaaccataagaccagttataatggatccctcaaccattaaagccggtgcaaactagattcctcggcggttttgatggtggttttggctgacgtggtgcatacgtggccggtttgacttggtcctcgtcctacgtggctggtttgacttggtcctcatcctacgtggccggtttgacttggtcctcgtcctacgtgacagtgatgtggcactagaaccaaaaattaaaaatttggaaaatatggggcccacatgtaggtcccacccttctctctatccaaggaggacggcatgtcgacgcctccttctcctctcttcctccgtcccgaaaatcctccatttctccttgagctccctcgccgactgatgagggcacgtggtgaggagaaaggcggcgcttggtgaggggggcggagacggacacggagagagagaagggcggtggctggcgaggggggcagagacagacatggagagggagaagggcggcgcccggctcctccctctctgcgcgctcgccggcttcccccatatcctccatctccgctcgtcgtgcctcctcctcaaagtggcaaccccttcctcgccagtcgccgaaagcagccacagtcgtgtgtgggcaagagagagggatggggaatccaccgccggccgcactccgacgactctcccggtctccccagcccctcgccggcaagagggcggagacggacaacgagagcattggaggagggcagcggcgacggggttctaaatccgcgcgagatcgggatagaacactgcagcgatggtggcggcgtcctcctcaactctggaaggggctcgtgagcatctcttcgccgccactatccttgtcggtcaccacatcatccttctcccatctcctcgctagccgccgctgctgcgcacctctccctccgcccattgccgttgagcccccacccatggcgcttaggcatcgccgacctccctacgtcctccctcctcacccacctcgctagtcgccgcgcgccgctccctcctttaccgccgggcgctgcacgccgccatcttcccatggcatctggaaagaggagagggagagagatgaagagagggagatggggagagaggaggaagaagaagggagggtgacaataacatgtggggcccacgtgggctccaccatttttaaattaatttattttgtgtaactgacatgtggacccgatagtttttattactttccaaattaaattgccacgtaagcgccacgtcaatgtcacgtgtgatgaagaccgagtcaaattagccatgtatgggccacatcagcaaaaaccgctgtctaaactgacttgggacttattttgcaccggttttgatggttgaacgatgaaaatcggattcgtcaacaagttaagggacctcagatgaacttattccttttccttttcttatgcgtggtccggcccaattcttcttactcccgcgcacaggccggcctgctcaaccattcctcttcttttcccgtgaaatactggcccagctagttagcaaaatgttcactcagctcagctagttgtccttgtatcaatttttgtaataatgttgcttcgactcctacacaaatatatgcacaattacatatcattaattaaatgtacatatatatatatatatatatatatatatatatatatatataccactatctctttttttatcgatcatgtccacatatatccgtgcggttaaattttattaacttaattcagggcacaattgtaaaaagatataatatcaaaatatcacactagtaaatttatataacgaaaaatactttcaaactattacagtcatggaagtacgaaatcaggaaaaagctcgcaattattccagagagtgtaccggccttttcttttcgtgagacgtgaatggatggagaacaataattagcctataatatacaccacgtggcagctttttatgaaaaaaagcactatgtgtggaggtacgtacatgaacaaaaaggttcattccgttgctacgtgccaaccgtttagaccaatcataaactacgtcattttcttaattaatgaacctggaaagcatcagtgtttgaatacatactacatgctaacttcgtcccaaaataagtgcagcaatagatatccgtgtccagcgttttgaccgtccgtcttatttgtaaattttatgaaaaaaataaaaaatactagtcacacacaaagtactattcatgtattatcatctaataacaataaaaatactaattataattatttctcaaataagaagaacggtcaaacattgtacatgaacagtgttaaaactacacttattttggaacggaggtagtagaaatcctgcacatataactatataaggattcaaaagtgacggttttaataattcgtaggttctgaggcctgtttaattattattttagttatatatatttttacatagtattacaaaataaaatatttatttttacttcgttgcaccaacacataattaattaatctgaagacaaagcaacacgcacatgacccacctgattaacacagctcattaataagagatcatgtgtgcatgagtatttcacaattgatagaagagatatttatcgattacatttttattaattttgacatacattacaagtacaaggaactaattaggaataatagatacccattgaccgatacaaatgaatacaacagaagcggaaaccaacaccagagaaacacatgcacatacattacacatagcttcccccgtctctagttgcatggcatgcaagaaagatatataataccatcaccatcccaaaatataataagttttagataggatatacggatatattacgaaagttacaggaataaaatgaaaaaaaaaggcagttgggattgattgataagaggagaaatatatatgtaagaaatttaattaatggaaggttacgattgttttataagagaatataggtgaagaagttgctatattttgagataaattttagaggctaaaagtaattatattttgggaaagatgagtaataataattaagttaattaattggtggtagcttgtctcctccaagtttgccctggagttcatattaaagtgtacgtggcacgtggtactgcacacgtgcatggcccatgcaagcacgcgttgaccggccggggaccctacacggcggccacctcgacggcgcgcggcggcggcggcggcggaatgtcgacgagcacctccggctcggccgccgccgcctccgccgcgcagctcctcgggactgggtgcacgtgcacggcgccggtgctcctgtcgggcgtggcggcggcgagcttgccgacgttgacgacgacggggagctcctccgccgccgccagcttccccttcccttctttcccctcgccggccaccggcgtcgcgttcatgtagaacacgtagagccccatctggaccacaccgaatgtgaagcccaggatgttgggaagctgcaaaaattcacacaattttagcttaattacaattcatgtggtcacacacataaatttgaattgagcagtttgtgatttgaagaaataattaggtaattgattgaataattaccgcgacgtatttgtccttgatgagaaggccgtagaggaaccagacgacggcgctgagggtgagcgtgagggagagggagaagggcatgtactccacgctcctcgactggatcactcgcttctgcaatatcgcatccatcgtccatggaagcagttcagttagcaacgagatcgatcgatcaaaccaagacacgaagtaaagatgagctagctagagattgacgacgactgatcgtatatatgcacatacgatgatgctgagcggcgcgacaaagacgctgacggagaaggcgacgcagacccagccgagggagacgacgcgctgctcgccatgggagagcagcagcgtcagcagcaggatcaccccgaacacccccacgttcagcagcagcaggatcttcgtcgtgaacacctgcaaaaacgacgtcgaaccatatatacttgtcaattattatattttactactacaaaacggtaaatatggaacaatcttatataggtgccggttcttgttcacaaccgatgacacctgtaaggggcctctcatcggtgccggttgcgactcgagaatcaaagggtggttcccaagtccccaccggcatcgaaatagggtttctgtggtagtgctagggtttggatgacatggatcgaaccttggccttcttgggggcgtaggcgaggtacatgacgatgtagatggtctcgatgacgcaaccggcggcgttgatggtgatgaggagggcctcgttggacttgatcagcgcgtagaagatccacagcatggcgctgaagagcgccaccacgtacggcaccgactggaacccctccgtcgacttgctcttgtagatccggtagaacgtcgggctgcataaaatattatgcacatatattatcggatacggaacgcggtgcggattgggaattaaaattacacaaaagctatatatgtatatatcatgtagaaattcagttacttacattggtgccagataggtcgtgaaggatatgaggttgcctgcaaagccaaaggaacagaaacaagatcaggattttgtaaaggaaaaaaggcaaagtaatgcgagtaaagagccccatggaggcagctaaggtagcgaccagacgtgataagttgtgatagatagacacgtttacaaactttatgtctagcccttgccttcctttgcaacaaagattgtgccttggcttttaacttgttctttaaattattgtgttacatggtgcactatgatgtcattaattagagtactatatagcttgacctattaattccactctctctccatggcaacataaatatatagaggttgcaccaaaggatcgaatgtttgctccacaagtaggatatacatacaaatgatgaggacttgctgtatatatatagtttaacaagaagcagaaaaattatatggctatgtgcatctcattaagtatgcttaggcccttgtagtttatatgcttgtggattttaagcctgcaattttaagggtggcgccgcgcgtataattctaatagacaaaagccaaaagaaataaaaaaaatcaaatctagcttttggcttattactacaagagtaccatccatattgccttcggaaggctagtagggtttttagcttatgcgctagtagctaattaatatgcccaaatagacataataaactgctgtaaataaaagtgctagaagaaattctttttgttgaaaataactgaaagaagctagctagaaaataaaaaacaaataaagaaacacaacaattttattattttatatatgatgaccactaaagtgtaatcctcactaaatgtcgtcgctagctatgcgtatctgccagcaagtaataactctgagcttatatgtacaaactcaatggtttctaataaaaagaagtaaaatgttggcaatgaagggaatgtcttagttgtggtaggtgatgatgatataccaaggaggccgaaggcaaaagcccagggatgctgcagggacaggccagccatttttgtgtgctaaaaggggggtaattgaagggaagagatgtagtgtaatatggaagcaaacaagcaaggaattgagcttgttgttgctagcttggaacttgtcacagacacacacactctaaccctagaccccctttgtggagggaagggagagctctgaagaagagttcaatgtgttggctgaaaactcttggagaggaatgaagggagttgtggtgctttatataggagcaaagctagctaggtgggaatcacttggttgcctcctacccatggccattcacgtacgcatcaaagtaatcatagaataattatgcaaagattttttttctttatttgcttttgaggaaagtcttttggacacgcacaataattaggcttttacaaaaatgagctactgttggagataatcctggctaattttcaaaaaaagttgcattggctttgtgcgcagcgcacctctcactagccatagccaatttagtgagtaattgctttgtgcattgtcagtagagatcgatctctccaacgtctgcagcttcctgctgggaacggtaaaagatagccgccgagtgcaacagcaaatcacatgagatctctcccagtgaaggattattcctgaatcctgatacggcttttgacttaaattttactactcgaaaaatattaatcgcggagaaaaagataattgtacttagacaaaagaaaggtagaattctctgccttgtttctatatattaattagaaccgttttgtaacatgatcttgcaattattgggtgatagatacatgtaggtatactatagtttctctgttctttgtttgcacgggtagattaattctcaatgtcgccgacagtgttctgaaaaaaaaataatgattgtaattgaatatgcaattctcccatgcgcgtgatatagctgcttattatttaactgtctttaccaaaagtaacttattttttgtcgaaggattgttttcacctgcagtagacatccctgtcgactaagctttcatacacagtttgttgggaagacaggtcgatttctgcttctgcgaagcgcgttgatcttgttctactcccacgtatatgaagctaagctagtggatctgctttttttttctctctacttttttctgtgcgcgcggctgcttgcctttccaatcaacctataagcatagcacaatatatatacgcaatcaatctgcatatatataagcatacttaatttcgaaatatatatgatacatacatatatttaaatcctaaatttgatacaggtactcgtatttaattgttcttttaatgataggcacaacatactcgtgtgtagttgtaaacagcgagacgtccgtggtaatttcgtcaatctcaaaatatgtcggctagagtagtgtatgcgtttgtaggggtgggtgtgagcacgctttcatgctgtgttatattttattggcatgcatgatgcatataggttggttagtttggaattaccggtgtctaagtagtggcactgctggaaggaatgacatgcatatgtactgtctgaaataaagtacatctctctgacataaatgattgcgtgatagctagcctctgatcatcatcgtttggagagaccgtgtttgactcctaaacatgattggaggaaaactaaagtgattttgttaaaaataggaagcaaagaacggctagaacgcctatcttttggaaaggttggctcaaccaggtctgaacttggctacctgaacctctgccatacgtttactccctgataatgcatgtctcttgtgcttcattcagctagctagtgtgtttcatatgcgacataaattgggggaataatgggcttgatcgatcggacacaagtgaaaactctctcaatagctttaactatatttagtcgtctcattttctacgaaaagtcataaaattaacttcagaattttttttttgcaaccaatattataacataaaaataatctccagacatagtattgggacagcttattatgttgtcaaaaggattgttttttctacattgtcaaacaatttcagtatttttagagaaaaatatatttcctctacactacataaaaaaaaaatttgtgacgtcacccttttatttttactggcggattaacaaaacaaacgcttctaaaaatgtattggagggttcttggccatgagccactagcgaaaaccgatttttattggcggactaacaaaacaaacgcttctcggctcctcctatctctcctctactttacaactccatctacctccactcccttcagcttctccacctccatcacaccacacgacggagacgatgaccgcggtggcaacggcgacggtgatggcaggctgtgacgatggtgccagcgacaggaggggacaagggcggtgacgatggcaaaccgcggatccaacagcgatggtgcctagatgccatggatcgtgcggcaagaggggacgaggccggtgacgatggcaatggcaagccgcagatttgacggaggtgataggtcctatggcgcgggcgggggggggggggggggggggggctcatccatgacagcgacagacggagtggcggcagcgacactcctccctctcggcggcggtggaggaaggagaggggggctcggctcagcttgttcgacactgttccggatcttgcggagttaagtcctccctttctcactctacctataacaaatcagcacaacaaccaccgacggcgctactaagatgacaaccagcatgatcacagtcgacacgatgctatttcattttcatatgttgttgttggcatattggaaatggagtgaaaaatcaatgtagtgctatctggatgtggatctgaatatggatttggtttgatttgaatttggatctcaagatgtggtgggtttgaaaatgcagcagcttttgtggatattgattaattttttttgctaaaaagttgttttgctagtggtactcttaccagtatcgcctgcaaaaatcgattttcacagctggtcctcttaagggtctacttgcgaaaattgattttcgcaagcagaccacaacagctaccaaaaaaatcagtcatttttactaaccttttgtcgctggcggttgtgtcagccgctagcgaaaacatattttggccgcctgcaaaaattattatttttaagtagggctagtttatattctcatttatatttgacgatgagagagatatatagttctcaagaacgtcaaatatatatttgaccacatgtagtagcatatataattcggagtaataaatgcattcttgtatactccgtaattggcatggtcctgactcaaaattttttatttgtaacagccataacttcaggaataagttcatttctcagtaatttttcaaggcttagatatacatatgtgcgcccttaatatcaaacggttgtgtggtgtttttttaagtactttggctcatagctagtactggcaaactgatcgtggccaaacacttgcctcgtggagagtaccacatcaactaaaacaaaaaggcgatgtaagaaatttattttgacgagtttctacggtatattccaattgttgatctttggttgatatctatatttgagaaaaaagttgacaatagtaaatttaatagaaatacaagttctgccactgatgagtagtgttaaatatgttatcctaatttcagtatgcaatatggtcgaattagtttcctaatagaatttgactattatgatcagtttcctaatatgaacctatgttttttttcccacgaggattcctagatttctcctttatatattccatgtgagctgcgtaggaaaggcgcgatagcccaatgtatcccctacgtttgtactcaactcctcaatatcattgcctgtcagggtccatggtttttcctgtaagagtttttcacataaaaatttgtatctttgttatgcatctattttttctaacaattagtgagttgcacgaaatattatcatacaaatgatttaggagtttttataggatatttaccggacttttagtatataaagattcatactattacagcacgttttactgcaaatatttttgtcccatggtacattatctgtctttgtggtaccaggatgtacagcaaataaacaaccaaaaagtgcacaacattctagcgtaaccatctatgtactgtaaaccaagacaaaataggtcgtgtatatatctttgaatggtggccaatatttccaggggaaaaaaattgccatccgcaggcaataacagaatcatcgttctgaacatgcaagtggtcaaaagagcatgtatatagaccaattaaaatgcaagaaaactctgtacacgaatggttgagagatcgtcctgcttaatgataaaaaggtcatacataccagtaccaccatcactgagattcactagctagcccggccggcccgttgattataggtgtaatgatgaccaaaaagaattgatctttagaagcaaaagaaatatcgccatttgcctagcagattccaattcgatcaagaggacgtaagctaatttaatttaattatatgttgcttcctgagaagattcttgtggtagtaatgacatgcagctgtgtgcgaatattccagtcacacaagactgaagagtagttgcaaatagttaagggtggtagttcatgcaaaagatctcatctctttatttccagagttcctcaccgttctttcctggtttgcatgcagctgatcaaccgcagaattggtcttcaagtgatcatcaccacccaagcctgcttccatgcccatcgtccatttgataaattatttctttaatgacagaggtaattttcggtgtctatactgaaatttggagtgagtcaataatgaaatgggaagaactttgttgaaaggcatgtaatagtatagatcgtgggacccagattatagtgttagggacggtgtggaaatgaacactaccactactaacattaacattaagtagtacagaaattgtctgaaaaaaacacgtacatattacagtaaggtgtgctaaagcatcatgcgtgcaaacagttcagctaaaatatttcgatcttccatccccagacgcagataattacatttgatgagatgttggattaaatcaagattacatcgttcgagacgcagtcgatttctgctccaccctctcccctccacttccacttcctccaccgagcgggctggtgccgaccctaaccctacccctccatttcctccagcatgcatggtgtgagctactgtaatagatggcctaagcggaacgctagtggtgtataaggggatggtattcatgactaggcacactactaccaaaacaattttctgtacaagtatccctgtaggttccagacggactggtcacgcctacaaaaatcgacctccatccctatcccgcaggagcgagtggcaggcggcgccaccagcactgacgatggcgaggaagcagccgggaatggctgcatccctatcctcgcccgtcaccgccgcctccaacaacgacgagaaggtggctggcctggagtagcgccgacgatgatggtgatgaggtggcagggagtggctccatccctgtctcaccggggtcgccgccaacaaccaggtgacccaatccgccggcggtggctccgtgaccgctggatctacgcctccgtcaccatcggggagctagggtgcggacaacataagcacctgcatgcgaaaatcgaatttgaaaacattcaggtcaaatttaaaaacttttaactcatatttgaaaattttcaagtcaatatttggaaacttccaactcagatttaaagttttaaaattttgagttaaaagttttcaaattaagtttcgaaattgaggtgaaaagtttcaaattttaacttgaaagttttcaaaatccgagttaaaacatttcaaaacttgaaaagaaagtttcaaaatttgagatgaaaattttaaactttgacctaaaagttttcaagatttgagtttaaatgttttaaattttgacttaaggttttatctttcaattgcaggttttaaatgttaaaattcaaaaccgtcaaaaaaaacacaatatgataatcatacaaattcagtgttaataaaaaatcagttataattatatttttgttgtagcaaaatcccgcgtacagatgtgtcagctttgattccggcgcgtatgcgcggattagttttctcaacatcaacaagtgcagaggcagcagccggatctcgcgatggcatccacgaagcgaggcagcagtaagcagattcaagacagagtcctctacaaggtatcgacgtgcagattccagtgatggtgtccgcaaataagcatgcatattgcaatatatataaactgaattgtcactactacagaccctatttttccgtatgcttgaatcgattatcccgtgcggtggctcggcccacctacagcgtctcgtctgggaaaatcagtattttcgcgtgtggtgcagtaaggaggaccgcacgggataatcccgtgtggtgcagtaaggaggactgcacgggataatagattataccccacggctaggatgtgctagggcgaccgcacgggataattcgtgccatcgccctagcacatgctagctgtccgggacaacctattatcccgtgcggtaggtataatttgaccgcacgggataatagatgcaaaattagacgaaattagtcgagctcaattataaacatcaaattacatagaatgtatagcatttgtaatattacaagtttcccccgcgacagatccttttagtccatagcatgtttcctctcccactcccttaggttcttgaatttggggtccgtaacaagttcgctatgaggatcgtggaactctcctagatggttatagatgtcgcaatgaatgaataggcacaagtctgagcatgcaagagtatgaactggttcaccacatctcctagaagttcaatcccctctggtgttgggatgtcaagcaccaatgacatctgattgccattaacccttgccacctggacccttgcgtagtccgccagaactgggctatcatagaactgtctccctcttatgaaatgccgaaattcatggcaacggtcgggctggcggcttatatagcccccgaccaacgcaagcggtcggcttacgtgggccgcacgagataatgcattatcccgtgcagcccatagcccggcgccggtcttcgccttgttccaggcggagccacttacggcccgcctagaagctaccggggctggtgtccaggaaaatctcgcgtgtagtagtgtgtctaccactttcttttatattcggttaaactggttgatacatacaactcaatatagtattagagtgagtggcctcgattttgaatcttcgctagcaccaattaaatgaaagtttccaatccacttctattgcacaattgaggtcagggagactcgcgtgaggagtaagactaacggggtatttggcagagatggttgctgttgtacagccatagcagctgcagcatgtgcaacaaaatttgtgctgcttgcaccgaagctatagctaggcacagccggctataacttcggtaaagagctaaccctaaaagagtgagttcttcatctttactgatcaatttaagcttaagcttatatgttaaactaacttgttcatgtaactcaatagtgtagatgactttgtttttatcttttttattgtcactacagacggctaatgcgaaaggtctgtgttttaattattttgggtattaaataacctgtatcacaaaaatgagaagcagtcggacttgtctatagtcactacgccagatcctcacacctctgacgggatacctgtgacgggcaaacgaattggtcagtagtgaccattacctttgacgggttatacgggatgccgtcaccggtgaggcatctggccgcggcccgtcacaggtatcccctcacctgtgacgggccgaaaggaaaacccgtcagaggtataccagtgacgagtttttcttccaacccgtcactggtatcccctcacctgtgacgggccgatacattagaagccgtcagaggtgatgggccgccacctgtgacggctttcatttctggcccgtcacaggtgagaggataccagtgacgggccgttgaatagaagcccgtcaaaggtatgagcaatacctttgacgggctttttttatctaacccgtttgaggtgtgttgggtctataaatacccccaaactgccaactgctttccatcccgaccattgtactgtccacaaatcggttgggagggcaaggggggcgattttttactaaaattcaaggtaaaaaacacattattctccattcattctcaacatatcgatcatcatttatttttcttcgtatgttgttgatttcagatggatcgtagatggatgtactatgcgcatcgttcgtctaccgagtatagagagggggtcactgaatttgtcacatttgcggataatgacagaaaaagtaggatgagcatgcacatgttgtgcccatgtagggactgtaagaatgaacagatgatcgaagacaaggatgaagtgcatgctcatttgataatgaatggattcatgaagaaatatacctgctggaccaagcatggagagcaagaggcgcctgatgtcgcagctgaagaagtgttggatcaggatgtagagaacaccgccgcagctcgagaaggcatgttcgtaccttctcctttaggtggagagaccatagatttggacactcaatgtctatctacaatgttgcatgacattgaagacgcagaggacaacgacagagattatgagaagtttagtaagttggtggaagattgccagatgccgttgtatgatggatgcaagtcgaagcacagcaagttgtcatgcgtgttggaactcatgaagcttaaggctagtaatggctggtcggacaagagttttacagaactctttgagctgttaaaggatctgttgccagaggggaacaatttacctcagacgacatatgaagcgaagcaagtattatgtccgttgggcctggaggtcagaagaattcatgcatgtccgaacgactgcattttgtattacaaggaatacgctgacttggatgtctgccctatctgtggggcatcaagatacaaacgagcaaagagtgaaggtgaaggaagtaagtcaaagaggggaggcccagcaaaggtggtgtggtatctcccaattgcggagcgcatgaagagaatgtttgcgaacaaggaacaagctaagcttgtgcgctggcatgccgaagaacggaaagtcgatactatgctgaggcacccagcagattcagtacagtggaggacaatcgataggatttaccaggaattctcaaatgacccaagaaacatgcgtttcgcaatgtgtacggacggcattaatccttttggtgatttgagcagtcgtcacagtacatggccagttctgcttgttaactataaccttcctccctggttgtgtttcaaaagaaagtacattatgcttgccatgctcattcaaggaccgagacaacctggcaacgatatcgatgtgttccttgaaccgataatcgatgacttcgaaaggctatggaatgagggcacacgaacatgggacgcatatgcacaagagtatttcaacctccatgcgatgctgttttgtaccatcaacgattatccggcccttggcaacctttctggccaaactgtgaaagggaaatgggcgtgttcggagtgtatggaggaaacaagaagcaaatggttgaagcattcacacaagacggtctacatgggtcacaggagatttctcccaaggtatcacccgtataggaatatgagaaagaatttcaatggacacagagatacagccggacccccgacagagctaacagggacagaggtgcacaacttagtgatgggaataaccaacgagtttggaaaaaagaggaaagttggaaagcgaaaagagaagagcacatcgaaggaaaaaacagaggagcatgtggaaaaacaaaagacaaaagagaggagcatgtggaaaaagaagtcaatattctggagactaccatactggaaggatcttgaagttcgccactgcatagatttgatgcatgtcgagaagaatgtatgcgagagtttaatgggattactacttaacccaggtactacaaaggatggtctcaacgcccgacgagatctggaagatatgggtgttcggtcggagctacatcccataaccacggaatccggcagggtttaccttcctccagcctgctacactctctcgaaagaagagaagattgatttgctaacatgtttgagtggtataaaggttccatctggttactcatcaagaatcagtaggctcgtttcactgcaagatcttaagttggttggaatgaagtcgcatgattgccacgttcttatcacacagctgttgcccgttgcaataaggaatattttgcctcctaaggtgcgacacacgatccagcggttgtgttccttcttccatgcaatcggccagaagatcattgatcccgagggactagatgaactacaggcagaacttgtgagaaccctatgtcatcttgagatgtactttcctccaactttctttgacataatggaacatcttccggtgcaccttgtgaggcaaacaaagtgctgtggtccagcattcatgacgcagatgtatccttgcgaaaggtacctggggatccttaagggttatgtacggaaccgttcacaccccgaggggagtatcatcgagagttacaccaccgaagaggccatcgaattttatgtggactacatgtcagaaacatcttcaattggattaccacgatctcatcacgaagggaggcttgacggtgttggtactgttggaagaaagactattaggttggatcgtaaggtatacgataaagctcatttcacggtactacagcatatgactgaggtggtgccgtacgttgacgaacaccttgcagttatccgacaagagaacccaggccgatcagagagttgggtcaggaataagcacatgtcttctttcaacgagtggctgaagaaccgaattgccaggttgcagaacttgcctagtgaaacacttcagtggttgtcacagggtcctgaatggagtgccaccacctggcaaggatatgacataaatggatacacctttcacacggtcaagcaagacagcaaatgcacagtgcagaacagtgggttacgcatcgaggctgctagtgacggtggtcgtcgttatcaatactatggtagagttgagcaaatattggagctagattacttgaagttcaaagtcccgttgtttcgttgtcgatgggtcgatcttcgcaatgtaaaagttgacaatgaagctttcaccactgtcaacttggctaacaacgcgtacaaggatgaaccattcgttctcgccaaacaagttgttcaagtgttctacatagttgacccgtgtaacaagaaactacatgttgttcgtgaagggaaaaggagaattgttggattggacaatattgcagacgaggatgattacaaccagcacgtccatggcataggtcaagaaatacctctagaagaggaggaggaagaagatgaagttcaatatgcacgtgtcgaccatgaggaaggattatttttgtaatttatgtacgtagtttatgtctacatgtctgttatctgtataataatgaagtgcaattactactgttagtgaaataaaataattaagtataaaaaaatatgtagtgtatgtgaaaatatgttaaggaaaataaaagaactaagtgaaataaaataaaataaaattgctctaggcaaactcacctgtgacgggctctatctgtagggccgtcacaggtgacctcacctgtgacggcccagagtgctgggcccgtcacaggtggtcttacctgtgacggctccacggttggcgcccatcacaggtgaggccacctgtgacagccacatagttggagcccgtcacaggtgagtttgactagggttgacctagggttggacatcttctagatcgatccagatccggcgcccactctcactcactcactctctcgaccgccgcctcgcctctctcgacctctctgccgccctctacgccctcctctccaccgccgcctcgacctctccaccgacgccggcctgcaccaccgccgccgcactcactctctcgaccgccgccatccatctccaccgccatctccaccgtcgccgtctcgacctctccgccgccatctccgccgccatccagaccctcctcgccgccgccctctctgccgccatctccgccctctccgccgccctcgccgcctccttctccaccgccgcctcctcactcactctctcgaccgccgccgtcctctccaccgccatctccaccgtcgccgcctcaacctctcctccgccctctccgccgccatctccgctgccctctctgccgccatctctgccgtcctctccaccgccatctccgccgccgcctccaccgccgccctcgccgccggtcgtcctctccgccgtccgtccatcgacttccccgacctccccgaccctgacctccccgacgccgggatccccgaccaccgccgaccgcctcgacctcttcgccactgcctctccgccgccgccactaggatccaggacgactacggcctgcgccgccgtctccaagtacgccgcttctccaagtatgccgccaccctcccccattcctccttttttccgatggatgaattgcattgtttagatgaatgaaatgtgatttgttgtttcgattattggtgctgctgtatagatgaattaaatgtgatttgttgtctgtggatgttttggatgaatgtaggggctagattttatatacatgattttggtgcagtgaatcttagcatcaatagaggatcttagcatgaatttttaatgcattttgttttctataattctttgataattaaggacctttattaggtgtagggtttgaaatctagttacaagggaagaattgatagattggccgcagatttaatgtagttccgaggttatcaaaccatcacagaatacaaaatgcatggggaattttggtggataggccagtgtagtccatggacggaaccgacctagacaccaaaattctccatgcattttgttttctgtcataatttgatgattaaggaggctttgcagattatctaaacttgttgatttatataccctttttgtctatgaataggtcaattgtatgaattgttgtttatatacatgatttatatacccttgctgctgctgccacaatgattgtgggctgttttattatctagacttgcttgaattgaatggatgaattgctgtttacatgaagttagtagtactgtctccttttttatctacacccctgctactgcccctacacttgttcacttgttccttattaaatggccagtgtagagtggttatatacctctacacttgttctttttttatgcataagaacagattttgtgcacttgctctttttttatgcataagaacagattttctgcacttgctcttttcttctggattgataaatggccagtgatgaattgctcaataagaacagattatctacacttgttcatttttttatctattcttctttttgcccctgttgtggctcaataagtaatgaattgctcaataagaatagtttatctgtacccttattgtgggctgttttttaaatttgcatgattgactcagtggttatatacctctacacttgttctttatggataagaacagagtatctacacttgttctttttttatgcataagaacagattttctgcacttgctcttttgatgttatgatttcctctttttatcccttcatgcaaatgaatataattgatgcatatttctgagcaaaactgaggccatatctttcatagtataccccgtattacatgattttggtgcagtgaatcttgaatgtggatttaagtgcaactgctgctgtctatgtttgcccttgctgtctatgtttgcccatgctgctgcctatggttgcaactgttagttaagtgcaacttgaatgtggatttaagtgccatttggacatataaccattcatggagtgtgtactgctatatatgttgctagacctattgaattttgtggacttgcatttatactcctgctgctgttttatgtcaatcatgcaaattctgtacccttgctgctgctgttttttaaatttgaatgattgattcagtggttatatacctctacacttgttctttttttatgcataagaacagattttgtgcacttgctctttttttatgcataagaacagattttctgcacttgttcatttttttatctacaataatatatgcatgatttatataccactgctgttgttgcccctgtacttcttgttaaatggccaaggatgaattgcttaataacattctatctatacctgttcttttctttatggataagaacagattatctacacttgttgatttatatacccttgctgtctatgtgaatttccctctgctgttgctgtttatgtgaatttccaccctgctgttgctgtttatgtgaatttccaccctgctgttgctgtttatgtgaatctccccttgctgttgctgcccctgtggcatatatacccctactgctgttatatggccctgctactgctcttattgctgctattatatggccatgctgttgctactactctaatttcctgcacttgctcttttccttatggataagaacagatgaactacacttgttctattttattgataagaacagatgaactacacttgtcctattttatttgggttgcttttttctcctagtagctgatttcctctttttatcccttcatgcaaatgattgtaattgatgcatatttctcagcaaaactgaggccatatctttcatagtataccccgtcactacattggatctaatgctatttagtctaatggtaggaaatttataatctttttcgcgaaagttaaaccatgtcaatgcccggcgcaaacccgccctccccaacacctgcgaggatccaggaagaagcaaacccaaccacagaggcagttgccgaaggtcatcccgcgacaacggcggtccaacaacccgaaattcatggtaatttataggataaattttcaccacatgaccacataaattttagctagcaccccttagcaaatattgccttctgtttgtgctgcagaattgccgcaggaacaacatacgtcgatgtcgggtgagacaagtgcaagtaggtctagtagaaatccgcggtcacaaaatatatggccgaccacagtgcaagttataagagaggttgacgctagtggtaggcccacggcgcccaggactgtcattggaagatggtctaactgctgcgggatagcggcacgtgagaacttcgggatcctccataaagatatcgggaaggtcacagaagccgagaaagagcgagcttggacggcaatggagaaatggttcacatttccagccgaagcaaaggataggctcaagcggaaggcattccaaaagatgggcaaagcttggaagaattggaagtcgaagctcttcaccgagtatgtcaacccgcccggcaatcatacgccgttcgatgaataccctcaaataaccgaagcggtgtgggaggaattctgctctctcaagaccacccaagagtttagggaatccagcgaggcacatcgcgtactgcaacagcggaatgagcacccgcatcggctgggcaccgcagggtacatcggcaaggaggcaatatgggcccaagaagatgcagccgctgcagcagcgaatgtccctgacccgttttcagacatccctgaacaaagagctcgcaactgggcgcgggcaaggggtaaggtcaacccggacggctctgtcacatttgagaacaaaagtgatgccgtcgtctatcaggaactggtgagttcactacttaacctaactaatttccgttcgtataaagtacaagttcgtataaacgactatcttcttttctagttgggcttggttgctgaacaagcttcacaaagcgaggttgagtccgcgccgaagaggcgcgaagatgacatcctcacaaaggcgctcggaaccaaagaacatcctggccgaactcggggaattggtagcgatgtgccctggaagcatggactccctcagtacagctcccaatacaggaaacggaaagtctccaaggaagagagggacgctcgtttgaaggccgaacttaaggttgaggtcattcaagaactagaagctagcatgaatgcaagggtggaagaaagggttaacaaggtgctcgccgacatgaatataccccgagtcacaacacctgctgtgcaaccaactcctcgtgtacaacacgacgcgagtccgtcacagcataggagtagttgtgcatccacagaggtgccggcccctggtctcccgatcgcaccactagctgcagtggaccacatcgaggtaattgttgttatccgatccatatctaataaaagacatttacacattccaatattaaattcaaactttcaccttatgcagggcgcagcacagtgtgtcctactagcgagagtccacccaactttcgctcctgaagtcgctgagggcatggctttcaagccctcggttacagacaaggtccacggcgcagacctgctagctgggtatgccaaggtgtccatcgatacagtaaaggacacctggtcaggctatccgctgcccgtgcccccaaatgatgaaatcatgactttgggcgatgcgcgcaagacgttcatacaatggcctaaagaagacatagttgtgaagatgactcctcgtccaagtcgaccgacggagcttacacctcccaagtctaagctatcaattgaggctccccgtggaccggcattgtcagtacctcattctcccggtggagctgatatggacttggcagatatagctcaaagcttggctccaataaagaccacaagaaaggccgatagctccccaccacttgtcaagggccagaagcgtgaacgaggcaaggggaaggtcggggagttggcgccggagccaaaaaggggcaaggctgcgacgtcgatgccggtgagcaaatcggggaaggtcgtgagggcgccagcccaatttgagctaggcatgccattggtggaggacaatgtgttagctgtgatgggtattgcttgccgagagctacataagcaatacatggagctaagcaatgccaagcggaaaatgagggagtcatccatagttggacatcacgaccaccagccgttcctatcgtcgcctgcctatataactataggctttgatgacctcttcgaccttttcaggatccggaagttggacactggtcttctaaaatgctactccttgtaagtgcataccttctatacttgtgatatgactggactatatctcctaattaaattagttctaatacgtaaatattttaaggttgtgttggatcgagagtcgtcgccatggtaatcaggttgggttccttgatccatccatggtaaatgaggttaatttacgacagagcttcactgaggtggttgactatgtcaaccggtgtttatgggcccatcaagacaaggagtacatcatgtgcgcacacaaccaagagtaagaggacaatacccttcgtgtatattgtttttgaagttaaggttcttagtactaacgctacataaccactgcgcaggcgacattggattctcctagtcatcgtacctaagtggagtagggttacctaccttaactccaataagtccaaagattatgatttcagtgaaatcaccaaggccttaaatatggcttggggcccatatgtggaaaagggtggtaggcacaaggagggcaagaatgaactttatcatgacaccaagtttgcatgcgcacaacagatcggagaccaatgtggtttccacgtgtgccacaacatgtcaacacttctaagagaggtgaaagatttcgaccctgaggttgttgctaatggcgaataagctcatttcaatatctacattgctattcaaaacgtgctaattaacctcttatttattaaacagaaaggtagagctggcttcaagatctcacccatcaacccccccgctatcagaggcgaattgtgcgcctttattcttgcagaaataatgaacaagaaaggacgttttcatgccaaatagactcatgaacttggctagataatttattgtgatgtaaaaaagatgtttttataatttctggcgatgtaaaaaattatgtttttatagagtgcaatgtaatttactttcatatgtgcaatatttatggtactttactaaattgtcatcacatttgatcaactacgatttatgttgtactattcatctgttttctcctttttttttcccttattgacaggttgtggaggttcacaacgaacagaatacaagaaattttggtaatcatttgaggactttcatggggtatgaattgtgtgctataataaattaaattgttgcatatgtgatgttgtaaattgttgctttgtgatggatctgtgatatgtgatgcatctgtgatgttgggcagttggggaatatgtgatatggagggggggtgactggcacctgtgatgtttctgtttttcagagggcatggctagcaattcctgaggctagccaatatttagcatttattttttttctggaattaactcatcagtgacggttcggaagaaacatccgtcacaggtaacctcacctgtgacggactcgcaaacgtcggaccgtcacaggtgacccacctgtgacgggcttttactttcgggcccgtcacaggtgggtcaccctgtgacggctactatataccggagatcatcacctctgacgggcctttatttaggggctcgtcagagatgagacacctgtgacgggtcctaacaagccctagtctagcttagaccaacacctctgacggccttctattaacttgcccgtcagaggtggatgtcaccactgacggccggccacccgtcaaaggtgactggacttaccagtgaccactgatcactgaccaagcccaaaaccgtcaaaggtgagggtttgggcccgtcacaggtgaccttgaccagtgtagtgagtgtggttctgctgtagttcgtttgtatatatatagttcgatttctcctattgcatgccctcttaattttgtgtacacaaactgaatgcctattataaaggtgaagtgcagagatatttgcagttaaagaactaggtgaagtgtcgcatcggttttctgttcctaatcgctatgtaaacctttgtacactatcatgcacaattgttaatcaattaggataggcatccatgctacatgctatcatctgtgacgccaacttagtattcttttctttcttaatttgcgatccttttttctttttcctttttgaattccacccttttttcttggaatcacagcccctttcagtaccttaattatagattagtttagtgtgacagatcgagagtgcgcactgaaaacttttaaaaaagcaaaccagccctgaagttgccccctgcaatattgtcttgtatttctaatcaaagttgatcgaatagcaagatacaccatatcatatatatacctcaaaacaataataaacaaaatataatttacggtaaagattaacaaaagatagtcaaggtttttatttacatttttggtaaattctaacctataaaaaatgaaagcattattaagtctataacgaataggaaggactgcctagcgtcattattaattggttgcatggaaatagaggtgcacgaatccacgctgacggctaaataacttatttgaaacacatactactttcctacatttaaaagtaaaccaaccttgtatcgaatgttacatatcctaatattcctaatatgatgaatctagatacctctagaaaaattattttttaagtcttacatacgacaatcatcggcaaaaaatcatcctatttttatgggcagttttcttaaggaaccacaggtgaaagtcatggtttttgcgagcaattccttaggagaaccatcaacaaaaacatacttgttctcacatgcagttttctgctatacccatctatgaaaatattttttatgtgttatgtgaccctgagatggcatcagccatttttgcaggcattattttgtctacctgtgaaaaagatagaactccaggggcctacaaataccatttttcacgctaggaaaaaaatccgactttttctcctcagccaaatcacaataaaagtgtataagcttggttcgatcagggacgttgccttttgtagcaacgaagttatttagagtgtatgtatggttgactttttatatatcctggctagtctggatcggtacactactacaattgtcaattttacatgcgtctaaaactctaaattgacctagcagagacgcggtgctgaccacctctaacaaaatggttgtgcagatgttatatatcaaatgctagctcttggaggtcagcctacgggaaatcacatattcatatgcgattccttaagacgattgccattttcactcgagaacctttacaaaacactagaacccagaaaccctagctcacccatactccatctctgctcaccgccaacaacttccatcgtacatgagcccaacccctcaccccccacaaccaccccacaaggtcaccatggatctgctgccgccaccgctgtctcggatgagctcaagtggatctgctcacatccgctatgagcaaggccgccatggatgcgccgccactggtggatgagcttgcatactgtacacatggacaacctcgcaggctccagatccagatgtgtctattggcaccaaatctgattcgccgtctcggccgtggacaacctagtatgaaacaaacttccagttcattcaagttatactacttgggatgaggaatgctctcgcaccatgacaaaaaaaagtcttaattaatgctcctatacagctttttgtaagcagtggctcttccatttgattacgtagttacaattcgttaatacatcattactagcaaatattgtctctaattcatctatcttatttgcagcaaacactacattttattccttagtatatccaaaggaccacttggccatacctcttgacccgacaaactatcacaagaaaagctacatagagttccttactaatttgtaagtaataagataccacccccacccccacccccaccccccccccccctaccaaattgctattctgaattttttaagtaaatcaaaaaaaatattttatcagcacagtgcgcaaaggttttacttcaaatatgaaaggtcaatagaggagcaaatactaagctaaacgccaagacagtttggttggtactgacatatgacatgaacacaaattctttgaataattacttatttataacgaccgatgttcttattatgttcgcagtgtttcaagcaaccccctcggcatcttgtactatgtgaatattacgtgcatgagatgatgaggatgctaggtcccgacaacaaccgacgagatgcaaaactgtgtaagatcaaagtgtgttttgattcttattctgtgatgaataattagcatctgtgattattggttttgatatttggagattatcgtcgaagtggttttggaaataatcaattttcaggtgatgatcggattcactattattttatgtgatcggtccgaccgggtggagcttgccggtcagaccggcgctatgtgtgcggtcagaccggccaggcccgcggtttgaccggccgacactgtgtcggtttcggtttcgggttgtttctttggatatccatgattgtttcatggttatggcttctagatggatactatacgtatgagatactattatttgctactaatgagtcaagtttgggatagcttggtcccggaatattgtttctttgtttgtttcatgtgtaggtgattcgatgtctcgggagagtatctgtggtgatggaccgggagtcggcttggtggtaagacgatgtccgtggtgatcagatatcatgcgggatactaaggctagagttgatgcatgtggttggtgaagattccatatggcatacgatggaggtattgtgtgcgtattgtcttcgatttgtgtttcaccgggtttcgacggtctaaccggcgactcaccggcggtcagaccggtgacacaccggcggtcagaccggcggcgacttcacacgcagtaggcgatcttcaggcagttgaaccgagtgatcaacaccggtcagaccggcggcacgagcgcggtcagaccggcagatcaactttggtcagaccgatctacatcgaatttgagggtaacttttatttccgctaaaagtttgggtttttgggtataccaaccattcaccccccccctctggttggcttagttcttatgtttcgatcctacaaactggacccaaactgacagacgtgactaacccaaagtgatgaacaaatgcaatactcaaaactaaaaattaaacctaaaactaaaccggcactcgacacgacgatgcaatttaaaattcaacaacacaaaaactaatagaacaatgcaacggctcaaattggctaggtaatggatgcaatatttttgtgtggcaattttctggttatggctatagataaagtacctaacggtcaatttggcgctctgataccaactgatgaggaaactaggtcatgatcttccgataggtattgataactctcaatttgttggaaacttgacacacacgatccagcttccgatcaatgagattcgaatcctgcaatcgcagtaccacatctcctctggttatcaaccgtgcactgtccggttgacctcgccgataagactaatgcttgcatgcgaatcgaagaacacaagtaagaacaagatagattacaacacaattgcacataaatgattaagcactcgaatttggggttccacaaacctatctaacagtgaaactgcaatggcaaataatctaagcaaaacccaaatctaaactatgacggctactgaataaatatgatttgggatatcctagggttgccctagggtgcacacccccttgggcttagcctacgacacaattacaaggcccaaaacccaaatcagattgtgtgaagtacgttgcttgttttgcagattcccaatagctcggagggaattttgacgtgggacctaaaccatatgaaagtagactacaaaattttttcaacaagtacttatggaccccgaaattccttctagatcagcggctaggtccatttaaatttcatgctgtcgggaggcccgaatccgaatccaaaacgtacagaactttatctcttatcttctattatccaaaagtggcatggtgaggtagaagtagacttggagaaggtcttgttttcatccccaatcaacttatttgatcatccatgcattccttacgctcggtttcttttccttcacacaagcaattacctctgcaaacgaaaaaatacaaaactcatggtgtcgtaatgtttgttcaaatatataataagtaaatctaacatagaacatatgcacctttagttgatgaatacataagttagtcatggtcatatccaagctagttgtgtcctcatcacaagatgcttacggtcaacggtaggtacacaacaaaccatgaatatgtaagtctggagattgttctctatacatcgtatttaatctgcaatttatttcctaagatttattgtcaatttttttcacaaattcctcaaaccccttttgtagcaaaccggttcaacaaggcaacaattatgaacatatgtgttgacctatgctacttcatatgccataactgttgcaatacaccatggtctttttaccatgatgagagtcaactagaattagaggacaaattcaagtccttaagtgggtgggagaaagaacatgtgtagtgaaaatgtgatgtttcatcaaatgggaccaatcgtttgtaatactggatgaatacccgtcgtgttgctgtgggaaattatgttgcataatatgtacaaataaggtaaggtgcaatatgatcatttaaaaccaaaacaaaatgacctcatgtattttatataatttgcacatggttgcaaatatagtgcaaggtgaatatatattatgtaattggtatttatgaattttaagcctcaaaataattgagattgaatggttttatgcgagaagaaagaaaagataattgtactatagatctatcatccagaggttagaaataattcgggtgatatggcttcatgagagaagagagaaatagtattaactacactacttagtaaggatgaactatataagtatactagatgatattcgtccgcatctccgcttctgcgccgccgctgctggtgcatccaacggaggccgccacacctttcccttggcacccatgcatggaactcacctattcttttctcccctgttaaccctactccatggatctctaagaaccatagcccttatcaagaatctgattggaaaaacagatcgaggaaaatgtggggagcaggaggagtggtgggttggtgttcccatcatattctcacaagttctccaagcaaaccctaggtgaggcttacctctcctatagtagtggttgtaggttgttttattgttttaattcatcatttttggagggttagaggatgggtttaggtgcagtgttttggattgttagttcggggcactgtcagtttttctgtgtctttgtatttcgccaattggaggataaaaacaattgtttctgcaaaagcatataactatgaagaagtagacaatgtttgggtctatcttctgaccaaagggcacgattttatctcaagtggtttaggagatgtaaatgttttgagtatgactattatttttatgtcgtaatctagatagtagtagattgaactgtttttggaggggttaaacagcggaatcagtcaggctgcctatagataaagttgtagaagttttttcttagttttccatattggtaaagtacaccctgattgggcgagtagaactccagttatggttgttttagtgtggacagtctgaattcgtgggcagattctgaagcttgttttgatgtgcacattaggccttttaaatggcaaaataaaaatatggtttctacatggaagttgtaggtctcattctgtagtttcctaaaatgtatttgtttgttgtgttaaagttaattaatagtgaagtaacagtgttgtttatagatgggagtggtgtttactgtttggcttgaggttgggatagagctgaaggagtgtgccacttaatttattatagtcatatttgaatgtgtttgctgaggttttgtttgtgattaggtggtggtccttcggatcgtgcatgataccaacccttcattggaggcaagtgcataacgaactaattgtatgattcatggattgattgctctacctatttatttctgatatatttctagatgatatgtgactgtttatgttcagaatattgttaacgccattcttgtttcaatattccgaattctagctttggttaaataattcaatttccatgcttgccatggatgtgaaatatggttttattcatgttcttgttcatgttccatgcgagccatggatgtgctatctggttttattcatgttcttatgggtaatcgttgatcacgcttactcagctttgctggcaaatgctagaatgtattcacaattatctgggatggaaactactatgtcaattcatgtttgcccacatgggaactactattttctttgatttggtgtttgaaaatgtgtttcttatcaaagaaagaaagctttatgtttatgctctattgccaatgatgtgtacatgtgttttctagttccatattgtatttgctgagtattttcgtactcactcttgtgtttatttggttttaggtacacattgatatcggcatgcatgggcgggaagtagcacccttaattatatacagatctatatgcacactatcaaactatattacttaggtccataataacacttgaactatatcctagtttggtcttataataatcttttagataactataagtttcttttaatggattatatggatcgatcgcactgtgggaataatattattaatagtttaatatataactgccagccttaaatgtccatatttacaggggagactgtcaaaattcttaatgaatttaggacttagtgttttttgttccgtagtgtgtagcatactaggtaggagaatacctagggtgttacagagaatctactccataccactgaatttgtcacagttctataatttttcactgatattgtctatatatctattataccggtgactttatcaattattcttaaatatttccataggttggattttttttaaaaaaaacccaaaatacccttatagacatacaatgttaacaattactttatctcattagaactttcaaaaatatgaaaatttgtatgtatcctcttgcacaacatggaaacttgtatataaaaaacaaatacatataaattagcaacaccatcgaaaatatgttgtgttcttgttgaacaaaatagacctaaattatgttgtacatttcaaaaaaaataacctatgaaacatacaaaatgcacctttaatgtagtcgtaaagttgcaagtgtataactctatcagttagggttctaatattgcaaatatggttgtgtaaatccaatgcagagactgtaagttatacttcatttgtaaaaaaaaataagacaagaaaaaagaaagaaagaaagaaagaaagagtacacccaaaagtaacagatgaagtgttacaaattaaagcatgagctatattccccgctttttgtaaaagctattgcatggcctacagagaatagcacgtgatcagaggttcattacttgtagcattcaacacgctcgatgtgagttaatttactactagtgcaatttacctctatgcaaatccaatcggcatcaaacaaatgacgatcagaaacattttctggaatttgtcgctataatactcgattgatctttgcatggatgatgtcacaccaaatataggccatgtttagatccacataaaaattttacaccatgttgatcacgtttgaacaccagcatgaagtattaaatataggctaaaaaataactaattgcacagaatgcgactaatttatgagaagaatctttttaccctaattgctccatgatttgacaatgtggtgctacaataaacatttgctaatgacggattacttaggcttaataaattcgtctcgcggtttattcgcggattctaattagttcttttattagtgcctgaataactcatgcgacaccctatataatatctgatgtggcacaccaaaacttacacccctacatctaaacatccccatatatcatccatggaaatatttatgacttttggaagaattcacaggctcctctttaggtgttgatggccatggggtcgacagctcaccacccatgctgaaatcatcttggccatcttttgtccccctaattaggcgccgcactgcatgcagctttatgatgatatatatcatatgtgttcttgataaggataatcacataccatcgtcatatatataactaaagaaggaaaataattaatctcatgcatgcattaagctttctttagtttgttgttatgaatatctggtgctaatctctatgtcatatccttataattattggtcaaaggagagacaccatgcattaattattgggcagtccacaggtgatgtatcatattgcaccaggtgtgtagagatcagtctctctccaaaaggcagagatatattttttttcctttttcttttcgccaggaaagaggttatgtcatgatcaaataatgggggggctttatattagattgtgtgtttgtgtcgtcaccaaactgctgatccctttactgcatccatggcaggcagcctcaattatgtggctcctgttgcttgtgcacatgatgtaaaccaattagggtacggtttgctggtggattattatgctttgccatcgatctcttgccacttggacttatctctgcctggatatggatgatgcaccatgccatgtcattcatgcacttggcactcaggagaggtcctatctgatatctctggtagctagtactggagatgtatgaatatctcaaggtgctgggttgcatgttggcatcaatgtgcatgcttgcatatacattgagatatatatgtaggtgcattgtgaacggtaacacaatggctttaaatttaagggcaatagcacatttgaccctattttgaggtctaactaccaccctgtttttgtcactttgctcatttgaccctacttttaaaaactgaagctacactctaaccctcttcagttaagggcattagacggtgttaacaaaatcccaaaataccacttctacccttgattatttgaccttattctcccaaaattagtttatcacaggacaagctcatagcgtgcgtagagctgtagatgcgtgccgcgtgcgggtgctggcagtcctcctcgtagccgagccaccgctgccgccgccgttgccgccgaccgttctcctcgtcgatgagccaacgtcacccctccgcagctaccgccgagccgccaccgggcgatcctcctattcaccgagcccccaccggcggtcctccttgttgccgagccaacgccaccgtcgccgagacgacgccacccctccgcagccgccacaaccgctccgccgccaccagcggcggccctcctcgtaattgagccgccgctcccccgtagccgccgccagcggagggccgcttcgtcgccgagccgccgctcctccgcagcgctctggtgagagagagagagaggataagaatgaaggtagaggatagattgatgtattaggggcatttttgttagttgggcttgtaaatacatgtttttttgttgttttttctaagtgaaatactcacggtgtagtgaaagaagggttaggcggtaacttcgaattaaaaaaacatggtcaaatgagcaaactttaaaaaaaagggtcaatttgatacttaagttggaaaatagggtcaaatgagtaattgtcctttaaatttgatagatgtgaagtgaattactgaaacagattatttactagacgcttaagaaaacattttctattgtattggttagatcacttgtttcagttattttttaagtttatttatcaaagtatttattttttctttgtaatcaagtagaatatcattcgtagaccgtagcaacaatccgcacaataatctattttaaactgtgtcttaagcttgttaagaaccgatcgacatgatttcttgatcagatggagtattcgaacaaatatatatatatatatatgtatatatatatatgcatatccaaaaagaccgcatattaatactgttcaaatacaattagccctactataggcacccaaatcagtgctggttctgaaggccctaccagtaccggatttccaaccgtacgtgcattacccggtcagcagcactgtataaccgtatctgtgcaggttgtagtaccaacatagacaggactttgatgagacagtaaaaacagcatcaaacgggctcaattatgctgttgacggtcgttaaggacctatttcaaccatcaactatcttaatagataaaagcaactaagatttcttacacgtatactatttataaatattttttaaaaaacatttataaataatgtaattccactaaaagagaaatacattatcgctgctattaatatcggttttgtatgaaccaacactaataaggtgttatatgtgtcagcttttagtttccgccctgtatgaaaataggcgacggtgagaaaaatgtcgctggtacatatgggtcgtcacatgtttggtgttatttgtacagtgtagtgctgggataatattccacgtaagctgtagaaatcctatgagatttttgttagagactccacgtaacttctctctttgaagtagagtattattgaaccagccaaccagctgatgcacaaccctgattagttaggcagaggctgctcgtctggctcaatgatccaaattcctaaacaacttcagcaaaaaaatgaaaacacatatatacaccatagaccatagctagacagataaagtacatatatatgagaaattgcaaaatttgacgggtgctatatgcactgtacactgtatatacgtacgccaccagctttttcccctgaacttcccatgttcccattagaaccgttttgaaactgaaatagttggcatgactacaccaccatatatatgttgcacaaattgaaatggttggcataacttctcgtgttaatttattttatcgggcttgacttcccatgttgcaagtgcatgatgctaaacataattaacttgtcagcttgaatgcagagccgccgataagggccgggtgtgcaaaatggacgaccgaacaaggcttcccaaaattaggggtccaacatttaatattttattccatactaatgtgtgttctaatatgtttaaagaccttatttctgtttattttcaaaactgaacatgttctatccccacaaatttaatttttgtggcaatttgcatagtacatggtactttcactattttctattgccatatcaacaaattcgttgcgataaaaaatttatcatctcataatttagcttattattttcgtatggatacggattaggacaaattttatatgaaatttatacctctcgatgagatctacaacttaaatttttcatttgaaatcttttaaatactcaaattcatgattcaaatctcagttaagcagtctcaaatggaattatatacatttttaaacaaaattgatgcttaggtgagttggtcatgaagagcgcgcgtgagggagaaatcttgggttcgaatcctagccatgacaagatatcaaaagaaaataattaggatgataaattaatattgaaacatttaatttggtacgtagaactaatgtcacacatggagtggtggcaatagttatttattgcaacgatgtgaagtgttgtaatatatattttttgccacatacattttatggcaataacaaaatttattacaactaaataaaaatcattgcaataacctattaccatgctatttattaccatggctagcaacgattttaagattgtggcaacatgtatctattgcaataattttagcattgatactacgattttttttatggcaataaattatttttctaatagtggatggaggtggtcctgctcctccaaggtgtcgaggagctcctcaccatcaccaatatgctctttgtctcccaattgctcttcccctcgggccactcggacccacttgccatcgtcacgcacaacccctgacgtcagctcagatatggtatcaatcagtattgcattgatatctataagttctgatggtatcaacgggtatcaacatattgtacttatggggtatcgactgatacctatgcatgggtatcaccttataccaataggaattagaacatgatacctcatatgtaccgatacctaaccagtattattgcatccaaacgggattctaattttaaaaatcttcaatcttattcttttattgaactgtctaaactagtttcattatgttccaataagtgttcgatgataatcatgaccatctcgaaaggctatagctcatgtgttccattttctgcttaataaaattcatatcactacatcaagatatatttttttccaaccttccttaaaaggagagtaaattgcactgacggtactctgaggtggatgtaatttgatacacaaacttgcaaaatgcatgaacttgtgtggtgcatgtgaacccagccaaagaagcataccatggttaatcctacttaattgaatattttattaggatgccatgcaggcacatatatcaggatgatgtcatctagatatgcatgtactcaatcaaatttatagtaagggatgttgattatacaaacaaataatttgtagcatagatgaatgatacaatgaattgaaaacagtggaataaaaaataaataccaactagatcagactatccacacatgtggtatacctgatgacccttttattatgcacatgtcattctaagtggactcttaagtcagcattattagtcacagcctcccattttgctcttctttcgcaagcattagacaagtccgtgcgttgaaacaagcattttgcaaatttgcgtaccagattgcatccacctatcaaggtcatatgccaccaatgaaatttattcttcaaaaaaatctttatccgatttaggtagaacgccatcactataacttatttttttgttctcagtatttttgtaaatatatgttctctatttattttgcatcggggccagtgccctactttttttttggccggcgatcggtcatgaatatgcatgcattccttcactgattgacaccaactagaacatagaacgtgcctgaagagataccccatttcgtcatactagattagcagcattgtgctaactagctagaacgcacatatatcctgacgtaaactgccaataatgtataatataatattcaactggccggtttatttctctgcacgaacttgaccagcagagcttttcatttgctcctaggtacgacgaccatccaaagttccaaattaacacgcactagcgacgttaagcagcagaagatcaggagtaatcttctatccgttcagatacgcgcgcgcatggcctgggcgcaccatcatcagtgtttaccattaacacatgagatagatatatagagacagaagttgattaaaagagggtgaggtatggaataaaattattgtaactgatggcaatgaaatggttaattataggaggacgaggtatggaataaaattattgaaaccgatggtagtggagtaattaactcgtaaaatataagtactccctccgtccctaaatatttgacgccgttgacttttttaaatatgtttgaccgttcgtcttattaaaaaaatttgtgaaatatgtaaaactatatgtatacataaaactatatttaacattgaataaaggaaaaggtacgaattacccccctccgaactatcgcggtctgccaaattacccctgtgaacaacaaaaccggacacattcttcacccccaactacgcaagccgaacaaataaccccctccctgccccggcctcaaaccatggtggttttgtcctacgtggcagtccagtcaatatttttttaaaaaaataagtagggcccacctgtcagttcccacacctatctatctctctctctccccaatctctctcactctctctctctctatctctctctcttctccctcctctcaccagcacggttgaaggcggcggaggtggaggttgctcaagcggccgtcacagagcggaggaggaggcgaggcggcgccggcagcagaggtaaaggtgggcagcagcgtgcgaggatggcggtccagcgatcggcgagcggggaggtggaggggatagggaaagggaggtcgacccgcacgacagcggccatggcgaagaggcggaagcgtcggtgaggcgggcgtagcagagacgggtgccgatggcgacgtcgtggacggcggtggtgtccactcgatggggaagagcggctcgtggagcaccctgtgcacgtcgctggcgccgacagcggccaccggatctttccgccgcgcttgcagggccgacctcgccgccgcgcgcgcctcgcctcgcctcctccctcgcctcgctcgccacctccgcgctgtgctcgcctcctccgctgcgcgctctcctcgcctcgccacgcctcctccgctgtcgcgctcctccgccgcagcactcgcctccttcaccgttgtgctcgccttgcctcgcctcgcctcaccttgctgccgccacctcgcctcgccgcgctcctccgctgccacctcgcctcctccgccgccatgctcctctgcccctgccgccggagtccttgactcccctccgtcgctcagttacctgcgctgttgtcctctgagagagtagagagagagggtaagaaacttaaaggtggggtccacctatttttttataaatgaattattgactggactgccacgtaggacaaaaccaccatggtttgagggcgggggggggagggggcgggttatttgtccggtttgcgtagttacgggtgaagaatgtctggttttgtggttcagtgggtaattcggtcgaccgcgatagttcggggggtaattcgtactttttccatgaataaatgataggaaaagaattaataattacttaaatttttttgaataagacaaatgatcaaacatgtttaaataagtcaatggtgtcaagtatttaggaacgaatgggagtattttttttaagaggattgccggctcgatctaatcggtagtaggaaaacaacgactgactcaatcaatatttagatcacagtagggaaaagaaagaacaaagatcgcgtgcatttaattgtgtttacgtgggttaaaatgttgacttgtttgtggctaaaaaccctaactccccaattcccctttcgtggcaggtacatgggcagcggcaagggcttcggcaactaacagggcagccggcggcactagcagcaaggcgacccagccaaagcaagattcagtcatattttaaccgatgcaatcacttactcccttcgtcctataaaatataagaatctagtaccggatgtgacattgacatttccaagtagtacgaatctagacagacgtagtactaggaaatgttccattcgattttaggttattatatttgggatggagagagtatatgctttaatcgatcaagtttttaggcacaaaacgtaaatgtgtggaaaaaatcatgcaaataatgtaatagatgtgaggatgacttaacccataccgaagaacaaccaatacggtacctatcactaatatcgaaagacaatcctacccttacatatatggattcagggactaaattttaattcctgtcacatcgaatgtttgacgctaattagaagtattaaacgtagactaataataaaactagttgcataaataagagctaattcgcgagaaaaaaattttaagcataattaatccataattagcacatatttactgtagcatcacatagggtaatcatggattaattaggctcaatagattcatctcgcgaattagtccaaggttataaaatgggttttgtcatttagtatacgtttaatacttttaattagtgtcaaacatccgatgtgatgtaacaggactaaaatttattccgtggatccaaacaccatcttaatgccctcttaactttaaatgactgacatggccggcctatatgtcattggttcacgtcaaagagcaatggttgtccgtacagctgccagtttagaaaccaactactacctctgtcctaaaatgtagctatttctagcacagtactttgtcctaaaatgaagctatttttctacctaccttctcctctcaaccaatcacaaccattctttttcacctactttctcttttcaaccaatcacgcaccttctttaatcattctcacctactttcttaatacccgtgccaacctcaaaaatgcttacattttgggacggagaaagtagtatggttgtcagtttgagaattggacagggatatgcaagttacggaccgaaagggatcgcctcttgtatagtactacctcagggatcgcctcttgtgtagtactacctccatattttaatgtatgacgctgttgactttttattcaacgtttgaccattcgtcttattcaaaacatttatgtaattattatttattttattgtgactttattcatcatcaaatattttttaagcatgacataaatattttcatatttacacaaaaaatttgaatgaaatgaagggtcaaacgttggtcaaaaagtcaacggcgtcatacactaaaatacggagggagtaattaatagtgacactgcatggtcaatgatgaatatgcgtgtcactattaataatgaacatctgttgcatatgcgtggtgcaaatatatattgaagcacgtggattttagggctttagtatgtcggaacagatggcccgaatatgggaaatttaattctctcaagctgctcaaatcgtacttattctctggtgggcactataatttcatactctactagtagctctcagtgcttcctggtcaaacgaatcgaataattcgtattggatgccagctaaaaccaagaaacattatgtcaggcattttttttccaactctgctgaatgcagctcaaatttcatgcatgcatgctttgcaaattaagttgaataaagtaccaaaacaaaactctaggtgtacttaacttcaggacgcctagctagtatatgtacattttcccggggtcttttgagcctgggtaaattattcaaattctaattaaattatatgatgttaattagtatataagtaaaaaattagataattagtacacattggacccccgatatttttttctaggttcaccactgactaattaatactccctccgtcccaaaatatagcagcaccatatcctaggttgctgctatattttgggacggaaggagtagtatggatttggctaccggccgatactaacttagcggcactgataacccaggtcattaatgccagttctacatccgacacatataaggatatatatgcgctggttatgtgtaatggtcggcacatataatatatatggtttatgtccagattcttggaaaaaaaattgtcatttttagaatggagagaaagagtacctagcagttactagacaaacacattaatcatttgggggaagtacttgtcagtcttccctttcccctctttctccatggcttgatatctaccattcgtacaaaaggggaagggggaatgggagatcggaggattgtagtggtggtcatcacttgcacaccgttgcaagttcatgtccattgctttgtgcccccctctctctctcttcgccatcacacaggtgcatgcacacatgtggcaccttgcacatcatcatcgttcatcgtcatcagagagatcatgcagtaattgtggccacaaactatttggaaccaaataaatttgtataatacttggtgtaatttctgaaggggatcggaattggtgtgttaaaaggctcaaataaacggcaggcaagagtgaccaagtgtccccctcttgagtgagaattaaaggtggtagcaaatcacctcaagaagaaaatgaaggtacatgcgtatctacatgtggttttccttgccaccaacagagatttggatccgatagagatatgtccaggctatctcttaggataactagatgaaaagaaaggctagctagctagcgggtaaaagaattaccacttcagtccatgaaatattaattgccagtgtgattagttatataagtagtgacccagtcacaaaaaaataataataatagaactaccctagtatatggaatgggaaataacctagtgcaaacgaatctgggcagaagatgagacataatcctagtacaacgaattaggacacatcttctatctaacttcgttgtactagattatatctcattccatactgggttaggttttttttagagacggaggaagtatggattatagatatacagggttgacatcaatcgagatcagtagggtttaggttacacacggtgagaaattgtcggagttcaaacgatagattagtctaactatgatgaggtgatgtgaccctgtaattaatgtaagactgatattagtaatgatcaatctctggtatagtagtatatattgcatcattactaaggattcgattttttcgtgcggtcaaaatacattttcccgtacgaaggtcctgcccgtctgcaaccaggtgcctgcgaaaatcaacatccacacaggataatacattaatgtctagaccaaaccaccactttgtttagtttaggttttgatttattgggcttagacttttaaactgactttttcttttatggtttataaaccggtgacatttaatccttcaagtttacgggtgtggtcccaactaattaactcagttaagtaaaaaaaagctaattaaatctaacattcgacactacagtgcaggaatgacttctggaatttttttaataaaaaacaactggaaaacaatctatttgtttagtccagtagtcctctacttttttgttcataagagcaaaaaaaaaagggccatagtttataaattttggatggagtggatcaaatttgaatggaggggaaatcaaacttggacttatcggtatatatacgtacgtaacaatctatgccaataagtctaggtatatttcttaattttttccatagaggaagtgtaactttcggcttctttaccaactagatgtacacacagctgctacaccactaagcttgaaaaaattattaccttaatatcggcaaaaataaaaataaaataaaattatcacatcactagcaataataaaagggtaaaaacatacaaccccattatatatcgaactaggagttgattgatcatccacacaggcctgaccattactaaaaacaagatatgttaaaatatttatgtttgttgcaacgcccataagaaaatatcaaatccagggttttcatcttagggtctcatgtgttgaatcttactctctccgtcccgtaaaaaaaccaatcctaccgacgaaccttgacacatgtgtgtccaggttcataactagggttggctttttcttgggacggagttgtgattgagaaattttgctacggacactctgacttcgcggttttaactgtaggatatcacaagaagtgatttttgggggaaaacactcccaaagttggatatttgctggtgaataccgcacgcattaaagcaaaaatttatggttgaagaggagagagaaatcgcctgaaatgtccttggcccacatgtcagctctcatatctctcttctctctctatcccctccttcacttctctctccaatatcttctctctatattccacatgtcagcgacgacggtgggcaggcgaggtttggcggcggcagcggcaggaggacgagggcagagcggacgcgaccagtggcgcacggagaagcgttggcgccggccgcggtgcgcccgaacagcggcgccggccggacagcagacaaggtttagcggtggcagctgtgtgtggaggagcagcggcgcggccggactgcgatggctacagcgcacggagtgagaagggaggggcgccgtcggcggccggcgccgttgtccgggcgcgcagcggccactccgcccttgccctcccgccgccgccggccgccggacctcacctgcccgccgtcattactgacatgtgggatagagaaagaagtgaaggaggagatagagagaagagagatatgagagctgacatgtgggcccaagggtatttctgacatttcatgcgatttctctctcttcttcaaccggaaattattactttaatatgcgtgcggtgtccaccagtaaatatccaacttttaggagtattttcccccaaaagtcacttcgtgcggtgttctacagctaaaaccgcgaagtcacggtatcctgtagcaaaatttccaatcttaatttgagtcactgtgactccaagaaaaacatcgatgggtcgggtccggtcaatgttgtcacttggataaccagtgacgaccatatgtacttgtggttttgaccccaagacactagtggagaaaccatctttggtcggtcgaccagatttcacaatagtctcggttgtattaaaaaccgggactaaaaatatctttagtcccggtttgaaagctccatgctacttttcaatctttagtcccggttgaagatctatttataatcccggttggtgttaccaaccgggaaaaaagatcgccatacgctttactcccagttggtaacaccaaccgggactaaagatatctttagtcccggttggtgttaccaaccggaaaaaagatctatgcggagatcggagaggcatgcgcaaccgggaaaaaagatcgacgcagagatcggagaggcatgcgcgatcggatcgaggtatttccttctctcctttaactcctctctcctcctctcctcaaccttatctcctcctctcctcaaccttatctcctcaaccttatcttcctctccttctcctctccttctctctaacagaccgagggcggtcggaggccaggccggcgcggcgcgcagtgaggcggcaatcggcacgagggcagcggggcgcggcgggcccgccggccggcgcggcggcggcgcgtcgcgcggtgaggcggcagcctgcggcggcggccggcgcgagggcggcggggcgcggagggccggccggcgaggcggcggctggcggccgcgcggcggcggggtgcggcaggcagccggccggcgcgtcgcgcggtgagtctgcagcctgcggcggtggccggcgcgagggcggcggggcgcggagggccggccggcgaggcggcggatttttttttttaagaatttgagattgttgtgtgatgtatttgattggatctgattgttgtgtgatgtatttgatttgtgtgtgatgtgaatatttgataattttgtagaagttgtgatgtaattttttttttgagattttgtgatgtatttgagtatttgagatgatcgattgtggatttggaagcaatttgaaaatgattgatttgtgattttggggatgggattgatttgtgattttgattaaaaacaatgaagaaaataaaataataaagagcaaccggatctagtctttttagtaccaaccgggactaaagataaagcatctttagtcccggttgttaacaccaaccgggactaaaaatggatttttactcccggttttttcacccgggactaaagatagcgatctttagtcccggattcatagtcccggttggaaaaccgggactacaggagggttacgatctgggagtaaaaaccctttctccaccagtgagaagagttaccacagctccaagaccacaccatagaacaacctcgtcactggttatgatcatcctgtatccaaccagcaaatgcatgccataccgttaactgttgggatttcactgggatcgaacgactcaatcaacaaacacgactacgagagaactagaacgaagaagcatggaataataggaagcaaaatttctgacaagaggcaaaactttgcttcgttctagttcacgcgtgtattgattgagtcgatatgcctcatctcactgatatgatcgtacttaaaaggaaccttaagcgatagggccaattctataatggaaaaacgaacccggtagtaatttcttcttggcagaatgacttttactctaagaccaagttcccttggggtaagaggagcattcttgaattgaactatcctctactaatattactaacataggatattgggaaaagaacctatttatttagggaagtaaggtaggtagtttgcaacgttatatacaaagccaagggaaatagagtcctgggttctaccattatcgagaaataaaacaatgatttccatatcatttcatgaaaaagattcttttgttgacccgttgtctgaataaagaaattgtatatcatgcggatctaggaagtcaattctttaggagagccaagccaaaaattagaaaataaagggtttaagtcttttgccttcttcttcaaggaccaacgaggatctaatccagccaactccatactaagctcaaaagtctatggagcagataaatgattaaaaatccttcccttcctgacacttgccgcatctgtcccttctcgagaataattattacgtgtagtagcgatcagtggttcacgctagagctatttcttttagaaaagcttgatccgtctttgactcgcttttgctcaagaaggctcttccttctagttccttgccaaactccacttgtaagtaactctcccttgaaccgaacgaactttacgagaattagttgttatctatgatgtctttttacacctatgctgcaacaagacctacattttacttgaagtgtgctcactgattgaagagctttgcttcctaaaatataatgcattcctaattggttgatccggtgaaatcccaacaccaacctggtccagtaaacgactaggaatgcatgcattcatcctcatcctaatctattaatttcatgcaatttaattatgggaagtgtccaaggtctttcaagagtctctcattatggtatctaaaacaagctgggtttctagcccgtcatctgataatcatcactaatcgcgtgccagtaccaacttggtgctctatcatcagctcatcacaacacacataaatatcaacttattacttggtgcttctcctaatcaaagatcaaaggaggcttcatcaagatgtggtgcaatattgtgctgatcactaattaatatgcgccgccggggtgtttccagtgggtgttacttaatcatatcacatttcttttggcttgccatatgctcaagtgcgcattgcaacttgaagtagcttgattgacagtttgtccctcggcatgctttaatttaatttcgcctcctaattctaattaagaccatggatatttagctgcaagagtgatccttccattgttcttccttttctttcactttatgaattaaacttaattccagtggctaaactatctagttagattgagcactagatatccctctactagggttgtgtttgaggagaagagatagagaagattgggaagatacgcaaaacgaggtgagccattagcgtatgattaattgagtattaattattttaaactttaaaaatggattaatatgattttttaaagtaactttcttatagaaattttttacaaaaaatgcaccgtttagtagttcgggaagcgtgcgcgcgaaatatgaaacaaactcactcccgttctccaaacgaacgcagcctagatctctaggtgcatgcctagcttatctcatatgcatggatccttccttttcgtggtcctttggatgtaaataagttcttagatactttcagcgtccatatgaccaaaaaaaaaaaacaaaagataattctgatggtgtgtaatattcatgcaaataaatgcaagtgcccattagtgtacaccatgttagattttgttccagccatttgttaagttagtagaaacttgtgaaagcaaggaaggaattaattagaggggatcgaatctttctcttgctagcttttgctcgagtgacacacgaatattctggaacagaaagagagaataaacttaactgcgactgttgcatctcagcatctgtgtgatcgatgatgcagtaactttctaggaagctaactagaatatatatatatatatgccatggaactgtcagtataaagttttgaattcagaaattctctggtcaattctttatttgtgtaggggtgttagtgctgtacatatagtggctgtgcatgtttgtagcaagtcgtgttcttagcttttgagatcgatcgaatcatgaaactgattaacaattttgatcgagaattagtatcttgattattcctgagtgtcagctgccattcaaacatgtagtatatgttgggttgccttttctttttttttttttccggttgagaaattctcgaccatcaattggtatctaggaagtcccttgaccatccatatgtcagcaggaataaaacttgaagcatctctcactgtttatgaagcttttggcatgcatgaaatactctctgcttttttattattactttgactttttgagactatatgagtggtttatgacagttgccagtctccaatttttttttcattcctaaagaattttatgcatgcatgctatgtttaaactttaaatgtcgtaatttaagaacttaagaaaattatgacagttcatgtgtcaacgtactgaacttgtccgctgtacagctttcaaaatgttattcccggtcaacgtacagttcatgtcaacgtactgatcctctatatatgttctaaaagaaaactaattagattacaaaaatcttcccggcacgaaaattatcgatatatggtacgtagagctgtcctcgaatcctcaataaaagtaccttttcaaattttcgcaaaagaaaatccttttcaaaaacattatacaggtttgtaatatctcccacatgaactgacgcaacataccgatccatgatattttaaaggaataagttcatctgaggcctcttaacttgtcaatgaatccgattttcatcctttaacctgaaaaccagatacaacgggtccctcaactgtcaaaacaggtgcaacatagatcacacggcagttttagcttacgtggctaattaaattgacccggtctttatctgacgtggcattgacatggcaatttggtttggacattaataaaaatagtgaccccacatgtcagttacaccaaaagaattaattaaaaaatggtggggcccacataggcctcacatgtcattctcacccctcctcttcttcctccactctccccatctcccctctcctctctctaggcgccacggggaggtccggcggatggcaacacggcggtggcagcgcccggtgacgcaagagaaggggaggcgtcggcggcgggagcgctaggtgagggttggatgaggatgctaggtcccgatcttccaatagttattgataactctcgatttagtggaaacttgacacacacaatgcggcttccgatcaacacaatctgaactctgcaatcgtagcaccacgtctcctctagttatcaaccgtccactgctcggttgacctcgccgagaaggctaatccctgcatgtgaatcaaataacacaagtaagaacaagatagattgcaacacaattgtgtatgaatgattaagcactcgaatttgaggttccacaaaccaatctagcaacgaaattgcaatggcataaataatctaagcaaaacctgactctaaactatgacggctgctgaataaatatgatttgagacgtccttgggttgccctagagcgcgcatccccttgggctaagccacgacataattacaaagcccacaacccaaatcatatttggactggatgaggtacgtgacttgttttgcagattcccgatatcttggtgggaattttgacgtgggaccaaaaccatatgaaagtagactccaataaactttccaacaagtgctcatgggccctaaaattccttttagattagcggctaggtccgtttgaaattgatgctgtcatgaggcctgaatccgaatccaaaacgtgtagaactttatctcttgtcttctatggaccaaaagtggcgtggtgaggtagaagtagacttggagaatgtcttagtttggtccccaatcaacttctttgatcatccttgcattccttatgctcggtttcttttccttcacccaagcaagtacctctgcaaacgaaaagatacaaaactcatggtgtagtaacatttgttcaaatatataataagtaaatctaagatagaacatatgcacctttagttgatgaatacataagttagacatggtcatatccgagctagttgtgtcctcatcagggggattcggcaggctgcaggcggagcaaaggggcgagcgagatccgcgagatccctcccctcctcctccggctgctaccgcgagatccacgagatccggctgcatgccgtacatcaccgtcccatgccactgatctgttcttggggcggtggggagtggtgagtttgtggtcgtttcttgcggcgtggtgaggtgtggggagaaagagagattgcacatatccatggcgcggtcccgcttctcggaggcgagggaggatgacaaagatgagttctttgactcgagggaggtcatgtcgccaacgtccatctcttctccggcgagctccgggcgccatgacaacgacgggttgcgctatgacggacccatgtttgaggtgtgggccaccacccagcgctactgccgctgacgccctccccttctcttgtgtcgtcggccgctggacctccccgtggcgcatggagagagaagaggggagagagatgaagagagggcagatgggaagagaggaggaagaagaggagggtgtgagaatgacatgtgtggcccatgtgggccccactattttttaataattcttttggtgtaactgacatgtggagtcattgtttttattactccctccgtattttcatgtatgacgccattgacttttcgaccagtgtttgaccatttgttttattcaaaatttttgtgcaaatatgaaagtatttatatcatgcttaaagaacatttgatgatgagttgagtcacaataaaataaatgataattgtataaattttttgaataagacgaatggtcaaacgttggataaaaagtcaacggcgtcatacattaaaatatggaggtagtaattttcaagtcaaattgccacgtcaataccacatcaataccaagcagatgaaaaccgggtcaatttagccacgtaggctaaaaccctcgtccaaaccgtcatgggacctatattgctccggttttgacattagagggacccgttgtatatggttttttggttaaaggacgaaaattagattcgttgacaagttaagggacctcacatgaacttattcttattttaaatgccaatttgcattgaatataaataagagagaattaatatggggcctccattgtaaaattcgctcacgaaataaaatagatggcccattcaattcattagctctagagtctagacaggccgagctgccaagaaggacagttggatcaaggatcacgcaaccaagcccatttaatatgttcccattttctttcactttacatggttaagatgaaaaacatttacggtgagtttgttgagaaaatataaattgtgtacactctcccaaaaagaatgccaatcctattattcaaattttgtaaagggaaacaactatagagtattactttttcccccaaccagcacctattcaaatttctcctcatgttcctccgaccaatctcctactctcagcaatctctcattgtattctttttgtaatagagggagtaaggttttcatacataaattttgctagttttttcacacgtaattttgaaagctgattaaagaaaaaaatctcagattattcaccagattattgaaataaattatttcatccatgcttaaaaaatacgttgtctaaaaaaaggttcttctgctgcagtgcttagactacttgttttaaactatttattaattttatttctcaaaatatttaacttatctttataactaaatcaaatagataatttgcgaaaataatccagacagtaatctaaatcaaacttggcccaaacctatgtgaatcacaaatatactcgcactagtttgcacaaattgttttcttaagttctttctagagggatttggctatttagcatctgagtgaaacttggagaatagcatattgcttgacatgtttgcaaccttaaagccctatatgtaggagcatcaattcagatgttaagggaagtatcttctggctctacatttgttactgcatatataatgcaaggagtttcttcgtcataagttctcttccaacaatctattgttctaataggctgaactgccattgacaggtaggcccaggaaaattttccggcccagtagggcccatatgttatttgtctctctttgtaagcaaaacacagatctttgtagcaagcaaagctgtattcctctcctgggagattctgctctttttgtctttttttttttcctttttgttggggagataatatctgctgcatttccaaaggtacattatctgaagaaaggggaggaattaggaaaagtaatgcttttcttaatgaaagagcaagctccaggagtattaattagacccaaagaagctgccctaagagctaaggctgaactgctggtgacagttccagcaaacattattagcgcctgcatttcagacaaactgcagactctgcatttcaaatttcatccttctgttcctcctgaacagtgtgaccagattctctaaggtacaagaaaactctgctgttgcattacattgatttataatgtagatcgatgtttaaccactactacatgtgttttctcatttcttgacatattagtagatctggtactattcatgtgatatatctaaggccccatcgtttggcttattgatggaagaagccaaacgacatatttacaaacgaaaaataatttgtgaataaaccttttatatatgcgctcttagtgatctaaaagcaaaggttgaaaaataaacttcgataaaaaaaactcaaaatcaactccaaatttaaagttgaaaattcaaattttagctaataagcataagcataagtgaaaagacgaggctgtaaaagtgaaccatccctttgtttcatcaaaattaattttgacatgtcctaatcattctgacgtagcaaagtagagagaagcaaaaaaatctctgatcttacatatctggtagactgatactactgatgttcacaacaacatgaagtgaaatagtgactggtgagcatgccctcagctatttcgaataaatataagctaaatttataattgaagtcacatactcacatggctggatttccttttcctagatcaaaaactgaaatttctaatcttcataaaacagaactgaaacttccaacaggggagcagagcaggccgcctgaaatactgaaatagaactttattcagactgcagagcttttcatatttggtatgattgtcattgtacacattaaaaatctcattgaacagcgcatttaataaacattacaagaatataaattaagtctggaaatacaaaagactcgaccaaattatcatctatgtccattaagttggcaactaaagcacacttctgctttcctctgtaatggatatctgttataactgatactcaatgaatctggccaaacgaagaattgttctttccctcttcaattatcaacagcaccctttaaaatacatcaatggtccttccttactgttcatttttccaaagagaaaattgcactgcgatcagcacaaatgctcttctgtatcaatatctcctgttaaattgtcataagttataacagcaccatggaccctaaatatttcactgcttctgtatgcagtagttttttctcaagaaatggcagcactgtctgtctttgcttcatcaatactctcaaaggtcactacatttgctgttgaatatgctctcgacgacatcaaacttgcttgcacagttaggagtgagatagaaaagctgagaaactcattgaaggctatttgcgctgttcttaaagatgctgaaaggaagcaatctacatctagttcacttaaacattggctggaaaacctcaaagacattgtctacgacatagatgatgttctcgatgacgttgggacacgagcattgcagcagaaagttggaaaaggtgaaatccgtacttattttgctcaactattcatttttccttttgaactgggaagaaagataagaagggttcgtgaaaggctaaatgaaatatctgcacttaaaagaaattttgatttgaaagaagaaccaatagacacaccttcagatcgaattgtacagagagaaacatactcaattgtagatgagcgaaagattgttgggagagataaagctaaaaatgatattgtgaaggtgatttcagaagctgctgaatctaattctgatacactgtcagtgcttccactaattggaatgggaggtgtaggcaagactgccctagcaaaactggtatttaatgacaaacgaaccaaagaaaagtttgataagatgctatgggcatgtgtagctaatgtgtctgatcttaaacatatagtagatattatcatacaatcagatagcggtgaaagcaacaagcaattaaccctagaagcactacaaaagaaacttcatgagctttcaggagataagagatacttgctagtgttagacgacatatcacatgataacattaatgattgggaagaattgatgaacctgctaccgagtggtagaagtggaagcatgattttaatcaccacgcgtctctcaaaaattgcatcagtattgaagaccatagagccatatgaagtgccaaaacttccacatgaagaatgcatgaaagtatttgctcgatatgcattcaaaggacagaaggcaaaggatactgagttactaaaaattggagaatccattgtacagaaatgtgatggtcttcctttagcagttaggactctgggatccctattgtctatggaagatatctctaagtggcaagaagttaaggaaacaaatatcccgaacacggatatcttatcagttttaaaactgagttatgatgcacttccatctgatttaagagcatgttttgccagcttatccactttcccaaaggactatgagattttcagagaacttttaataatgtattggatggcaatgggtctgttgaatacagctagtggaagtaaggaggcaataagaatgggagagagatattttagtgagcttgcagggagatctcttttccaagactatgtttttagtcatgatggcaccatctcacattgtaaaatgcatagctttgttcatgacctagcaatatctgtatctcccaatgagcatgcaacaattagctgtgaaaactttagtgcctccaaaagagttaagcatcttgtgtgggaccagaaggagttctcaaaggacctaaaatttccaaaacaactgagaagggcaaggaaggcaaggacatttgcgagtaggcacaactatggtactgtgagcaaatcctttcttgaagatctcttggcaacctttacacgcctacgaatcttggttttctctgaagttgagtttgaggagttaccaagttcaattggaaatttgaagcacctaagatacctagatctgcaatggaatatgaagatcaaataccttcccaattctctgtgtaagctggtgaatttgcaaacacttcaacttgcttggtgcaaagaactggaggagctgccaagagatgttaaaagacttgtcagcttgaggtacttaatcctcacatctaagcaacaatatcttcctaatgatgccctcatgggttggacttccatggtatttctacagattagtgcctgcccaatgttaacatcactgacagaaggatttggcagcctcagtgcacttagagagctatttgtcttcaattgtccaaatttgccctctctcccctctagcatgaaccggttagtcacccttcagaaattggtgattcataactgtgatgagttaaatttgatggaaccaaaggaagcaatgggtggaatgaagagtctcaaatcaattgaacttgtggggcttccaaagtttgagacctttccagatagctttgcatcagctgcttccactcttgaatacctgaaggttagtgactgcaaagaattcaagaagttgccagatttcatccagagattttcttctctgaagaaaattgagatccctgaaaggcgtcaatattccagtaaaacctgggcatagaagtaagtacatctaccttagagtggtccatacttccattatcaatccataatccagttacttgtctttaattgtttttttactacacattttattagtgataatattcaaaacatttgcacacttgttcacttcacccatatgtttgcatgcagatgatatacgcttataaattaaccaccatggtggttgaagttgtgctacactgttgcttcaaaagcgcaagctcagttcttgcgaaaaatatcaaactaagcaaggggaattccgtcattccatggaactctgcaattccgtgtgcactgttgcttattattacttgttctaaaaaataggtggctgtgcgtgttgcgtgcaatacaccaatgtatccctataagcattttataggttgctgcacaataattgtgtcaataaaaaaaacatgctttagctataagcgtttgaattattaatggtaactggtcaaatgtaatatgtacattactcctaataaaatgagtgaatataaaagcaaatatgattgttcagcaataaaggccggagaccttggtcttgttcaaatgtgcttgcatccttgcaaaaagtgtgatctttttctttcttttttcttttttttttttttttttttgcagagtccctttcctgcttggaagaaccctgattgtaattttagttgcttgacaacgagcaggatgatctggctgagatcacttcaaagtaatctcagtgtttcattgttagcacaaactatgcagtagcttgcaatttcgtttgtttgatatgaatttcttcagtgctatgcatttaattgcatacatttagatagatattatggcttctttccacctcgctcggcacgggcggggaaaacaaacaaaatgagcctaccaagggagcttagtactgtacccacttaaaccgataaaacgctcatctgatactaatactgataatgataatgaggtcatatatcaatacaacacaagaaatgatattttctaccactaattctcttcctaatgccactgagccagcgatggcatggcacatcggccgctcatggtttgatccagaaataaaaatcggatcgagtcactatacagagtatctattttggggatcaattttctcgctcttttgcgagaaattcgtagacagaaatgaatctagtagcattttattatctgatttgcacagattggattcagaatccacttcctctgcggttggtctggagggaaggtgagagagggggagatgaggagtcacaggctaaccttcgccgccatcgtcgctcgccgttggctgaagggggacaagcggactggatggctcccggtgaacgacggctagagccgccgccgcccgcagcatccatctccgccggcggccgccgccggcgaccgggtagcggctagccggcgagagagcggagaaagacgaggagcaaatccgcgaggtagagagaaaggaaacaggagactgacatatgggaccatgtagcaatggtcatcgagctcacatagtaaacactacttcacgatagattttcctggaagccgcccccttttgtttccatgcggttcataagtggaaccgcacgggaaaataaaggaaccggcacggggctatcgccctcataggaaaatcgatttttccgtgcgggcctcctaatccgatcgcacgaaaaaatcgattttcccatgcaggctttttaagtggaccgcacagaaaaataccccctcctttccctcccatctacttcaaatttttcacatcctctctcttactttttcccttttattctccctcaactacccctctctctctttccctcctccccttcccctctgtcgggctggcgaggtggcgagccgggcgcggtggcggacctactcctgtaggtcgtcctcgtcgtgcacgtcgaccactgcctcccttcctgtgcagcggcgagcgggcgggcccccacccggatccggcgggcggcggcgattttcacccttttttatttttggttttttttgttccgtgaggacggtataacacgaccgcacgagataatcgattatcccgtgaagttgggtcgcccgcacgtgaatatgccgattttcccagacgcccggctgcagacgggccggactactgcacgagataatcaaaatgcccacataggaaaataggtattgtagtagtgaaaataaagttccgctcgatataaattttcgagtaaatttcagaaaactccacctatcatgatgcaggttacaggttacataagttgtaaaaccatagagattttaacatgcaacacaaattgggtattatggttctaaaatttcacaaaaccataacattaaccattctgatgtactcatatattaaaattttaaaaagtggatgtaatatttatacgatggacaaaacacgttgtggttttgagatgagtttgtaaaactcaaagtgtgatagataagagcaaaatttatcaatagtgtggttttgtgaaaatacataaggttacgtgccacgtgccaaaatcccggtgattttgtgtaactatgttatgtggggtttcataaaatttactttatttttatttttttacacttaggacataattcacttaaattccgatatataattttatgttaaaataagtttatggttcaattatggtagtatttttttcgatttggatccatcgggcatgggactatctaaaaaaactgcacataactactccataatataattccaataattgtaatataatttcactatagctatactataactataaaatacttgtatataagtactaaaataatatatgcgattttatatttaacttatataaaaattaccatatagttacagtatagttacactgcagttataatgtaactatagtgtaattatattatagttgcactacaacaatattatagttaaatttcaaagttttttgctgtgacggttttttagcaattccgtttaggcatttagctccaactggtcaaggtcaatgggtcgtgccgctgtgggacgatgggccagattggagtactggagaaattagctcagctattcatgtatatagacaatatacatacatatagcaattttcttgggggaaaataggggtacaattgtaccccatgttccccgcccctagctcaaaagactaaaaatgatattgaaagctcacatgacatattagtaatattatgagcatcaggatttaaaccttagtggggtgaagttatgtgccccatgactttatcatcacactaccagtgcttttcctttactgttagggtttttaaaagcttagctaaatactacccttaaatatcagatatctatgagggagggaatacagtaacatcatcaaattctcaataacattttatttacacaaaaattcttttcaaaaaaatcatgtagcacagtaacatcctacatgaactgaagcaccatctaccgaaatttagcatatttcaaatgccaatttggatcccaagatacataaaccggaaatacacgccattcaattaatttctcggcccatgcagattcataatccagataggccaacctgccttgcaacccagcccatctcatatgtcatctgtgtgcatggttattggttaagatgcaaaaaattgcaatgagtttagttcagaaaataaaaattttacaagttctttcagatgtaatttttgcaagttgattcaagaaaaagccaagttctatgagaatgctcaccagtttgcaaaaatgtttgttttgaagaaattattttaaaaggattgcttggcatcttagcgacctcaaagcctttcttgtaggatcatcgattcagatgtcaagggaggtatcctctggctttgcatttcttacagcataaaatggaaggagttccttcatcacaaattctcttccgataataaactaagaatgttctaacttctaagagtgttatgaacaggcattgacaactgacaagtaggcccaggaaaattttctagcccagcagggcccatatgttctcaaacatgtgtcttattctttggaatgaaaagtctgatccttgtagcaagcaaagctgtattcctctcctatgaggttctattttccattattattttttgtcaaagaagatgatgttctacttacattctcaaaggtatattatctgaagaaaggggaggaattaggaagactgacatgcttttcttaatgaaagagcaagcttcagggagtattaatagggcccaaagaagctgccctaagagctaagactgaactacaaatgacagtttcagcaaacattaagcacttgcattttcagactaccgcagacttccttgtcccttcaccaagagttcaaaagcaccaaaccagattctacaaggtacaagtaacttttgcttgttgcattacttgatctgttagtgcagatgcagcagatcgatatttaaatactacatgtttttctctttttttgttgacatgatagtttcagtactgtataatgtatatcttggtgttcctgatgagaattagcaccatgttatggcagtaaagtggatagaagcaatctaccattgatctcaagtatcaggtagactggaaatctggtacttctgtttgaatatagccatcaagcttcacaagttcacagcaacattaagcgagaaataacggtgagtatgtgtacgcccccagctatttcaaacaaacatgggctaaatttatgattgaaattccgtagttagattttccttctactatatcaaaaccagtaattttcaatactgagcaacaaaacctgaagtttcaatacccggaatacagaacatttcgtatttggtataatagttgactctagaaatatattgtaatgatttgtacacatcaaaaatctcattgaatcaacataatgaatgtgacattgcaaaaatataattaagtttggaaatgtaaaaaaaaattgaagcagaacatcttctatgtccataaagttgacaactaaggacctagggggcagccctcggcccgatcatccaatttgctccaacgatctaggcatggttcagtagtcaaagcaacttcgtcactttcgtgtacccattggatggcagcccttccggggttccttagggaccaatttttagatcacaggggacaaaatatatggggattatttatgccactcttccaaaagtgcaagtactcctaaagctttctagatcagcatttcttaaataacttgttataagctatccattggttttataatatataacgtttaataatccctacaattgtccatattgtgtccaaagcacacactgctttcacctggaatggaaactcttatactagtactacctatatttcaacttaattgtctttctagttttgtcccgagtcaaacattagtatctttgactatcaatttctagaaactcacatagtttaacatcataaaatttgtttttagattcaccatgagaaatattttcataatatataattcacatattactagactatacgaatttctagaaattgatagttaaagatagaaatgttttacttaggacaaagctagaatgacacgtagtaatttggaacggagggaatactaaatgaattgatcaaaatcaggattgttcatttcctttttcaactaccaacagcactctttaaaacaccaatgagttaatgatccttctttactcttcatttttcaaaaggaaaaagcactgcaatcagcgcaaatgctcctgtatcaatgtttcctcttacaatgttgtaacaacatcatgggccctaaatatttcattttccttatgcagtagtttttctcaagaaatgactgtgctatctgtcttggcttcatcaatactgtcaaaggtcaccacgtttgctgttgaatatgctctcgacgacattaaatttgcttggaatgttaagagtgagctggaaaagttgaaaaactcattgggagctatttgtgctgttctgaaagatgcagaaagaaagcaatctacacacagttcacttaagcattggcttgaaaatctcaaagatgttgtctatgacatagatgatgttctggatgatgttgggacacgagtgttgcagcagaaagttagaaaaggtgaaatctgtacttattttgcccaactaaccatctttccttttgaactgggaagaaaaataagaaaggtccgtgaaaggctaaatgaaatagctgcgcttaaaagagattttgaattgaaagaagaaccaatagacacaccttcagatcaatttgcccagagagaaacacactcccttataggcgagcaaaatatttttggaagagataaagctaaaaatgatattgtcaagatgatttcagaagctgctgaatctaattctaataccctgtcagtgcttccactaattggaatgggaggtgtaggcaagactgccctagcaaaactggtatttaatgataaatcaaccaaagataagtttgataagatgctatgggcatctgtatctaatgcgtttgacctaaaacatattgtaaatataatcatacaatcagatagcggtgaaagcaataaccaattaaccctagaagcattaacaaagaaacttcatgagcttttaagggacaagagatacttgctagtgttagatgacatatcaaatgataatgtcaactgggaagaattgataaacctgctaccgagtggtagaagtggatgcatgattttaatcactacacgtcttacaaaaattgcatcagaattgaagacattagaaccatacgaagtgccaaaacttccacatgaagaatgcaggaaaatatttgttcgatatgctttcagaggagaaaaggcgaaggatagagagttactaaaaattggagaatccattgtacagaaatgtgatggccttcctttagcagctagaacattgggatccctattgttcagaaaagacatttctatgtggcaagaagtaaaggaaaataatttgctgagtactgggaaaggtaaagatgatatcttgtcagtattaaaactcagttatgatgcacttccatctgatttaaaaacttgtttttcctggttatccacttttccaaaggactatgatattttcagagaacttataataatgtattggatggcaatgggtctattgaatccagctagtcgaactaaggaggcaataagagtgggagagaaatactttaatgagcttgctggaagatctcttttccaggactatgtttttaatcatgatggcagcatctcacattgcaaaatgcatagccttgttcatgatctagcaatatctgtgtctcaaaatgagcatgcaattgttggctgtgaaaattttactgccactgaaagagttaagaacctagtgtgggaccacaaagacttcacaacagaactaaaatttccaacacaactgagaagggcaagaaaggctaggacatttgcatgtaggcataactatggtactgtgagcaaatcctttcttgaagatctcttagcaaccttcacactcctaagagtcttggttttctctgaagttgagtttgaggagttaccaagttcaattggaaatttgaagcacctaaggtacctagaccttcaatggaatatgaagataaaattcctacccaattctctgtgtaagctggtgaatttacaaacacttcaactcgcttggtgcaaagaactggaggagctgccaaaagatgtgaaaagacttgtcagcttgaggtacttgattctcacatctaagcaacaatatttacctaaagatgcccttggtggttggacttccatggtatttctacagattagtgcctgcccaatgttgacatcactaacagaaggatttggcagcctcagtgcactcagagagctatttgtctttaattgtccaaagttgccatctctcccctccagcatgaaccggcttgtcacccttcagaaattggtgattcataactgtgatgagttagatttgatggaatcagaggaagcaatgggtgggctgaatagtctcgaatcaattgaacttgcaggacttcccaagtttaagacctttccagatagctttgcatcagcttcttcctctcttcaatacctgaaggttagtgactgcccacaattcgaggagttgccagatttcattaagagattctcctctctgaagaaaattgagatccctaaaagccgtgcaccttccactataacctgggcatagaagtaagtacatctagctttagagtgatctatatttccatagtcaatccattatccagttacatgtctttcatagaattaactactcattttattagagataatatccaaaacatttgcagacttgctcatttgactcatatgtttgcatgcagatgatataagcttataaattaaccaccatgtggttgaaggtatgatatattgtttctacaaaggcgtgagctcagttattgtgaaaaaaaaaactctcaaatgatgtgtactgtcttttaaataataggtgattgtatgttgtgtgtaatacaactatgtatccctatatgcattgtataattgtgtcaattatgtatcaaccatgttgcctcacaataattgtgtcgataagaacatgctttagcgataagtatttgaattcatggtgaccagtcacaactatcatgcactcttaatagcatcactacacactctagcaaactaaataaaatagagtaagtgaattttaaagaaaatatgattgttcaacaggccacaacaataaataaaccttagtcttgttcatacctgattgcatccttggaacatgtttagtttcttgacaaggggcaagaaaaaaatgtggcgacaaaagacgacacagcagcaaatcctcgtgagcaatgccaaattgatccgatagagaccacttgaaagtaatctcgacgctttactgttactacaaataataaagttctccatttcatttgttctcgaatccttgatattaggccatgatttggcctgagttgtttaagtacgcatgtaattgtagctaggagcttatcttgaaggcccatcagtgccataacagtttctgccagccattgatgcaatggccctatgagcagaacaagcatgatcatttttctactccctccatttcatattataagtagttttgacattgtatcgatctaatcagatttgtttaagtttgaccaagtttatagaaaaaaaaatatagcggcatttccaatacaaaacaaatatattcgatattatatttaatggaactaatttggtgttatagatattgctaatgttttttaataaaattggtcaaacttaaagatatttaactgaaaaaagtcaaagcaacttattataatatgaaacaaaaacagagtactaaaaggaaagtactagttgtcttcctaatgccattgaaccagtggtgacactaggaaagacaattagtgctcataatttgatccagaaattaaaccggtcgcatcggtggacaataatcagcgccagtgttcttcctaatattctctcttatgcacgaaatacacactaatggatcaagcattatcctatctgatttttcggtgaaggggatttcgaatctactttccttgcggtgggtaggtagcgaggaggaaggacgaaggagcgcgccgcgcgcgtacgatagacatggggtggggagagacgggctaacctttgccgccgccggcgatgcgatcgccgctcgaacaccacgcgaaagggagggagagaggcagagaccggacggctccgggcgccgccgccggcgggatccatccatctccggcgggaacaaccgcggatcgaggcgccgagcaggggagcagcgagagagaaggcaggaagaaagggaaggaagacgagcaaactcctcgcgaaccgctacagggagatttctttggtaaaaaaaaaaagtaaatttcattttggccatatatttttacccatgttacagcttgggtcaggttttagctgagtttttcaccttggaccacttcatattaccatttgtttcaacctggaccatagccgctcgtcttctccgagtaggcgacagcccaatgaacgccgcggtctccagcgcggcaggtcgacgctgtagagcgcgacacggcggaacaagcagccggtgccgacgtagatggggccctggaggccgtcgaggccgagctcggtgcagtcgaagaagacgcggttgtggttggcgtagcggtcgctgggatcgacgccgtcgacccgctgcgggaactggacgaacgcgaccgcgacggcgtcttcggcggctccgccgccgccgcgttcgatcatgaagcagatgccggcgcggagggcctgcgagttgttgacgtagtggtcgcagtcgaggtcgaggatgaagggcgcgttcatggcgcccgccttccggtggtgcgcgtggccgcggcgcttctcgcggcacacgtacacaagcgccgggaggcacacgtcgacagaggcgacgtcgatgagcttgctcccgtccgcaacgccgagctgtggcacgctcccagcagaatcgatcagtacctgcacaactccggcgtggtcatcggccgcgccgcggcgccggcggcgcgcatcggcggcctgcagcgcgtcgatccgcagccgcatctcctcgtactcgcggcgcacccgtctcctgtcgcgcaccagctccggccacgccatccccctgtagctccccctcgccaccaccttcgccttgccaccaccaccctcgccggcgttgaagtacgcctccgggttcctcggctcgacgccgtgcttccggcagaacgacacccaaagcgccgcgaaccgggccgcctccacgaccgcgttacgtgtcacctccgcgcctgcgtcgtcggaaatgtagcacgtcaccttgccggcggggtagcccgcggcgaggatatatggacagcacggtgttcgccgtggcgagcggcggctccttgtcggggtcggcggtggtgacgaacacgtccatcgccgggagcagcgcgtcatcgtcaagcgctgctatgccgtcggggtcggcggtggtgacgaacacgtccataactgtgcgttgctgctaaactctcctcagataggactaggagcgcctgacaggaaagcagcgcctgacatgtgggcccaactagacagtgctgaccggtgaaagcctcatcgttttcctgccaaaaaattaaaatttgatttctgatctttctccacatattttgtaaagcatatatttatactaatataaaaaaggagttgtgcttatggatcctacggtgaaatcacgaaaaaacctggccgacgcgcggacgcgccgaattcccgttgccgcaattttctccgcactaacctcgctgcggcaatatcctctatgctaactccaccacccccccttcgtgtctgtaggcgaagtagttgtagcagtggcacaaacaaagtggttgccgatgtttagctctagggtggcagtatccctctggcttccacctacactgtccaagataaccacatcttctctctccagcagctaagtgatcgggttagagttttggtgttagggataagatggtcaagagagagctgttggaaatatggtcatatatcggcatattttaatccaaaatattaagacaataattatggcatgaacagtgtagggtgatctagtgataacatgtaacataaccagtagcatgctaaaggcatgaacatcaggagcaggaacatgtaacataaccagtatgctaaaggcatgaacatcaggaacaggaacatagcaagttgcgactaacaggattaacattgcgactaacaggattaacaacgctaacaacaggagaatgatataccccgagaatggccctctgctggattgtgaggcagaattgcctccgttggtgttgacgttcccagcaccggctccggctccagctctaggcgcgccatctccggctccagctccaggcgcgccatctccaggcgcagacatggtggacgagaacgagcagtcgtgcgggaagcactccccaaaaacctgatcacccgcctacccgatgcagatctcaggcgaaggtgtggttccggaggccctgctccttccaatctctcgtgcacgcaagcgatcagaagcgaggaggcgagagagcagcacaggcgcggaggaggaggaactaacacccgggaaagaagcaagcggatcgttctgatcggactcgcgacctccttatctatcaggagagaggcagtcgtgggaacgtgggatcatggacgcgccgttgcggaggcagtcgtgggaacgtgggttcatggttgcaaaagaatagtgacgtgacgtgacgcatgcacgccagccaagcctcggctcggcgcgcgcgcgcgtgcgtgtggctttccgacccccacctcaaccagtcaacaggaagcctccaataactccctatttaggttgagatattcctcgcttaaatcctgaggtggtattattatccttaacacttattatgggcctttgagatttaataggataaattgggcctagcccaattattctaacaatccccaccaaatttcatggctcataagaaatgttctcaaggttgttcctgtttgatataccagggttttggtggagactgttaagttgaacttccacctaggaaatgagctacatcagatcacaactgaataatggactatgccttgaattgtcagttttgtgtgatctggtttcactcagatccttgactggtactgggctgtcgttcgcatcccctctgttcggagcatataagtcaaactctaggcctttcatgagtatctagagatcgcccaaacctcatagactgtgactagcagtcgaactcatataggtgtgttccttctgagatgttctgcaagtcaacatctctgcttggaaaagccacccggatcacattaaggcatgagccatcctaccatgcgggaaagaagagaagtacatcatgaaaatgagcccttttcaagggtctcttctctcagtcacacaatagtttgtttcgccatccaaattcacaagatctccgatcacaatggacaggtttccactattgtgcaaccttaggtgggtatcaagcccatttccctcgatgcactatctatcacattacgtggtagccccttggtaaactgatctgccagatttctagccgtttggacatagtccaatgctatcactccggagtttttctgctttctgacagatttcagtcttctcttgatatgcctagatgacttcatgttgtcctttgaactgttcactttaataatcactgtttgattatcacagttcattaggatagctggcactagtttttcaaccactagcaaatccatcaggagttcacgaagccactcggcctcaactgtcacagtatctagtgctgtaagttctgcttccattgttgacctcgttaagatggtctgcttgcaagacttccaggaaacagcaccacctccaagtgtgaacacatatccacttgtggcttttatctcatcagcatcacatatccagtttgagtcactatacccttctagtacttttggatacccggtatagtgaattccatagctcatagtgccctttagatagcgcattactctttccagagcctgccaataatcatctcccggatttgagacaaaccggctcagcttgcttacagcaaatgagatgtcaggcctcgttgtactagccaagtacatcaatgaaccaatgatttgagagtatctcagttgatcccttgctattcttcggttttttcttaatagcatgctgggatcataaggagtaggagctggcttgcagtcactatatccaaagcgactcaaaaccttgtccacatagtgggattgcacaagtgtaatcccaccctcatctcctctttgtagtttgatgttaagaataacatcagcctctcccaaatccttcatttcaaaactcttggacagatagtccttgacctcctcaatcacactgagactggtcccaaagatcaatatgtcatcgacatataagcacaagatcactccttctcccccaccatagcgatagtacacacatttgtcagcttcgttcacaacaaagcctacagatgtaagcgtggtgtcaaacttctcatgccattgcttaggtgcttgcttgaggccatacaaggatttcaacagtttacacaccattccctcctgaccttctagtacatacccgtctggttggtccatatagatctcctcctccagatctccgtttaggaaagctgtcttaatgttcatctgatggacgagaagaccatgagaggctgccagagcaagtagtactcgaatcatggtcaagcgagcaactggtgaatatgtgtcaaaaaagtcctcgccttccttttgggtataacccttggccacaagtcttgccttgtacttttcaattgtaccatcaggcctaagctttttcttgaaaacccatttgcatcctacgggcttgcacccatatggacgctcaacaacttcccaagtaccattagacataatcgagtctatttcactgcatactgcttccttccagtagtcagcgtcaggagatgaatatgcctcttctatggttcttggggtgtcatccacgaggtatacaatgtagtcatctccaaaggattttgcaaccctttgtctcttactcttgcgagtatctacaatgttgtcctcctcaggatttccctcaggcgtttgatcattgtgttctatcggtacaaagtgctcatggggcatgacagtttcttgactagaggtgctaggtgtatgtttcatgggaaattcattctcaaagaatgtagcatctctagactcaaaaattgtaccaacatgcatgtcgggtactccagagtttactattaagaatctataacccacactgtgaatagcataaccaaggaacacacaatcaacagtatttggtccaagtttccgctttttggctataggtacatttaccttggccaaacagccccatgttcgtaggtatgagagatttaatttcttcctttcccattcctcgaatggtgttacttccttatgcttcattggaattttattcaggacatgacacgcagtcaaaactgcctcaccccaccattccttggaaagtcccgcagtgtctaacatggcattcaccatctcagttagagtacagttctttctttcggccaccccatttgattggggtgaatagggaggcatcctctcatgaataattccaaactcttcgcaaaaggatgcaaactcattggaaaaatactccccacctctatcagacctcaaccgtttgattttcctttcaagttggttttctacctcagctttatagatcttaaagtaatgcaatgattcatcctttgttttcaatagatacatataacaaaatctagtgcaatcatctatcagtgtcatgaaatatttctttccccctttagtcaacacgctgttcatttcgcacagatcaaaatgaacaagttctagagttgccaaattcctcgcctcagatgccttgtgaggcttgcgaggttgtttcgattaaacacaagtatggcacttggaacctttgaccaaagtgaattttggaattaaactcatgttagctaagcgtgtcatacaaccgaaattcacatgacagagtcgcgaatgccacacattagactcatcattctcgctaatatggttcacaacattatgattattacacatgtcattcaaagaaaagcggaagaagcctccgctgtcatagccttttccaacaaaagtcacatatttagatacgacacatttattgaactcaaacacaagtctaaaaccttctctacacaatagagagccgctaacaagattcttctttattgaagggacatgctgcacgttcttcagctgcacggtctttcccgaagtaaacttcagatcgaccgtaccaacaccatgaacagccgcaagcgacccatttcccatcaacaaggaggaacctctcccgacctgataagaagaaaacagagaaatgtcagcacatacatgaatattagcaccagtatccacccaccaatcaggtgagtgaaaaatagagagaactgtaggtaatattttaccgtaccccgatgttcctcagccctcgctaatgaccatgttggcagacttcctgtctttgcgctcaggacagtccttggcccaatgcccagacttgccacacacaaagcagtctccctttgcctttcccttgcctttcttcttaaagttggttgcaccttgggtttgacatcaggcttgactttcttgttgttgtgggatgcatgagggttcttcttctataccatattggcactagaacctccctcaacctttttggcccggacgtcctttgccctcgccttctcctcaacacccaaagagccaatgagatcagaaacactgaactcttgtctcttgtgctttagagaagtggcaaagtccgaccaagaaggtggcaatttggcaataatgccacccgcgacaaacttgtccggcaactcacagttgttgttctcaagttccttagccagcatctgaatctcatgagcttgttctactacagaacggtcatcgaccatcttgtagtcatagaactgctccatgacatacagctcactgccggcgtcagaaactccgaacttggccttaagtgcatcccacatgtcctttccggaaggcatgtgcatgtacacgtccactatgttgtcagcgagtacattgatcaatgctccacagaacaggcaatccgaagcctcgaacttagcctcttcctcaggagaaagaggtggttcacttcgtttgccccgtgaaacatagaagcactgcatcgctgtcaaccacaatagtgcacgtgctttccatctcttataattaggaccatcaaaagcatgtggtttcagtgcagcagcaaagccaactactgaaaatgacctatcaggtttttggattgttggaaatatggtcatatatcggcatattttaatccaaaatattaagacaataatcatggcatgaatagtgtagggtgatctagtgacaacatgtaacataaccagtagcatgctaaaggcatgaacatcaggagcaggaacatataacataaccagtatgctaaaggcatgaacatcaggaacaggaacatagcaagttgcgactaacaggattaacattgcgactaacaggattaacaacgctaacaacaggagaaggatataccccgagaatggccctccgctggattgtgaggcagaattgcggctccggctccagctccaggcgcgccatctccgtctgcagctccaggcgcagacatggtggacgaggacgagcagtcgtgcgggaagcactccccaaaaacctgatcacccacctaccggtgcagatctcaggcgaaggtgtgattccagaggccctgctccttccaatctcttgtgcgtgcaagcgatcagaaacgaaggaggaactaacacccgagaaatcgttctgatcggactcgcgacctccttatctatcaggagagaggtagtagtgggaacgtgggatcgtggacgcgccgttgcggaggcagtcgtgggaacgtgggttcgtggttgcaatgtgggatcgtggacgcgccgttgcgaaggcagtcgtgggaacgtgggttcgtggttgcaaaagaataacgacgtgacgcccgccagccacgcctagcccacgcccacgcccacgcccggcgcgcgcgcgcgtggctttccgacccccacctcaaccagtcaacaggaagcctccaataaccccctatttaggttaagatattcctcgcttaaatcctgaggtggtattattttccttaacacttattatgggcctttgagatttaataggataaattgggcctagcccaattattctaacaagagcatactcccatgttaatattgcattgagggagatcaaaagaaatccaaaagattaggctctaccaatcaatgtgggtaatttgtaattaagaaaacaactagcgtcgatcaggtgggaataagcgttgagtgatccaccctcggtttccttagctgggaggtcaactcccaacatattcctccccagatcccctttgtgttatgtttccaactcccgtcaatcgtcggtgggcagaatagggtcaagagagcagtcgggttagtcttgtggttggctttatcctatagtttatacttcctccttttcttttcttgtatagtttgaaatgatgatcgatgtccatcatctttgtctttgcatatctaaccatagttgtaactctctctggtgtccattgactaattggatatctccgggtcttccaacatcgccaattgtgttaggaatgtagcagataagcaacggaggcaaggtctacttcttgcttccaatcgttgaagataaacaccggccgattcggtttttttggcgagttcccagcaatatctggtgtcgcatttataaggtcagagtattgtcagactaagattccattgtaacaacatgaacactgcagcctccatcacgtgcaattgtagttgggattgcacctgatcccaatccctcttggaggcaccgattggtttcatctgctaaggcctatctcattctttgctttatcatcgccatctgtgttacctggatacggcacaaaagtcacgtatccgtatcggatactcgcacggatacggatacgtatcgtatcccgtacgtatcccagattttcgtgattttcaattaaatagaaaaacactgatacttcgccgatacgttccgaacgttcctgatatggttccatctgctattcttccggatgctcctcatgctcgtggccacacgtggtcccggtgctgtcgtcatcgccacacgcggaacagcatcgcagctaggtgcagcggaagattgcccgcgccaacgctaggcggaggccgtttggccgctgccgccgccgccttcgccgctgccgctgcaaccgccggtggctccgtggaagcacgagtatacttctcttcgttcccctgtgagccaaatctcctcttctggcttggctttccaaattcccatgcttgatctgtaattttttttcttatcttcttgctacaagtagtcaagcattatcatggattttggatttggaagctcaggctagtgcatgtgcatctagcaatcctagtgctagcgcggctgctcatgcagctgctgatttatcaagagaaagcaagggcaagtaacatcttgatattggtggtggtcgatcggtaggtgttgggtcctcctacttgcctagtcggcacttcacttgatgttgtaagcacgatgcatcaatttacatgtgttgatttttgtctgaattcgccaacttgaattatctagaaaagataatttggagaagattgatacggaattggctgaacactcctattttattgctatttccttaatatatataaatatatacacgtatccccgtatcctaatattttgaaaaatgacgtatcctcgtatcaccgtattgcgtatccgtatccgtatccccgtatcgaggtaacatagatcaccatcaccagtagaaatttagcaaagttagagatttgtcacctgcatgtgcattgcttgcagtgtgcgtgcgtcctaacatgagaaaacaaataatcctatgcattcgaccttctccaaaagaaacatatttagtgcacataaacgagaaagctcattagcacataattaattaagtattaataattataaacttaaaaaatggattttttttaatttttaaacaacttctatatagaaatttttttaaaaaaacgcatcatctttgaaaaaagtgctaacagaaaacgagaaagttgaagtttgtagttgaagagaaaaaactaggccaagccattagtaatttagtatccccttggtaaaaacatgctattaatactttagggcttgttaactttgttgacatttttaacctttttaaatttttggtattaacaaaatttagcaagacaacaaactaaacataacattatcaacacaatcctaccaaaataatctctagaactttgagcttgtttggattgagacctacttttgccctaccaaatttttagcaactccaatagtatcttatgcatgattgttttgctatcaatttttgctcatacaactacaaactctatgctactaattttggtagtgccaaaacttgccaaagatattggcctaccaaatattttttacaaaaaaaaaaccgcaccaggcattgtgtagtttcatattgatataatagaaaaaatattacaaaattatagccctggaaggctataaccaggaaaaagcaaacaaacacaccaccaccacctgctagcagctcttcacacaacctaggagaaaagcgttagcactgagccggacatcactaagcgtgaccaatcactgctagaccttaaggagggtcgcaaacgtcttgccgaacaccgaaaccacacaagacgacaaccgagaaactagcgaggaccgacctaaggcgaggtaagaaacgaagatctctatctcttgagcctccaggcaaggcaagagacgaagatctcctaagcctcttggcaggtcatgacgcaattattaagaccggattggaccgggaaaaaccggaaccagagcctctgtcggtccggttaaaagactggatatgctatgtgtgggagtatgtgcaagcaagggagcagtcgggggaaaatgaggggaaaataggcttgggacggattcgaacacagtataacgtgtgagggaggaagctcatcaaccactaggctatcatccttcttgtgctttaaaggaacgaataatatatttaataactattgaactgggttagaccaatggttcaaccggtagaaccagtgaaccatcgaaccaagagcctcaccggttcaattactggttcagtctcaatgactatgcttaggtgccaccatatcttgtccaactagattgggtttttatctagagagagtatggtacctcaaccacgccccaagggggtcacgatgtccgaagacgttgtcgtttccagctcaggaaatcacgagctaggcttttgcctaccaaaccctctcttgcacctgccactgccacccctaggttccatcaccctaacaaactccgctagcacgcatcttagccgtactgttgccccaccaccggccaaaccaaaccaagatttgttgccctgcagtgcgaccattgccgccttctgccagatcccgcaaagccacgccaccggagcatcccttacccctaccactaccgccatcgtctcgtcaatctagctccccacgaccagagggatcgaccataacatgggaggaggaggagctccctagagatgaagaggaatgctacataggacaagtcaactcggacaactgccatgcctacctcaatcgctagcacccatgcatcatctcccaactgccgccacttccacacctgtcaaaatcctcaaggcacaccaactagtcgtggcaccggcccaaatctagcctaccgatctccttccccacacccctgatgtgactgtgccgatccgatccactctacgtgacatacacccaggatcacccatcttccgtaccgcctcaactacatcgtctcgacgttgttttccagcttcagcctcctcacccgggcccgatcaccggtgcattggatctgcattgccaaataagctaaacatcacctttgtacgtacctcaaaagctctactctctctgtcaatataagtgcaacctaatatggatgtgatatgttttaataatacaaatctggaaagaatatcggtccagatttatggtactaggatatgttgatatccgtactaggatgcatttatattgggttgaagggtgtaccaaaattagtatggccttaactaaactaaacatcacttatatattctaatcttattttaataaaatttgataataccaaaatttaatagtagtattattaaagtttcgatgcacgcgcatgtgaagaaaaggccacagtgagaaatcacacacttttggccttgtttagtttgcgaaaagaaaatttctgggtgtcacatcagacgtttgaccggatgtcggaaggggttttcggacacgaatgaaaaaactaattttataactcgcatggaaaccgcgagacgaatttattaatcttaattaatccgtcattagtacatgtaggttactgtagcacttatggctaatcatggactgattaggctcaaaaaattcgtctcacgatttctatgcaaactgtgcaattagttttttaatttatctatatttaatacttcatgcatgtgtccaaagattcagtttgatgtttttgagaaaaagtttttgggaactaaacaaggccttaggcctttcacagtgctcctacgtggagcggaaccttgttgcgccatgtaggattttcgtcgacgtggtgcgtgcacccgggaccaaacacggaaactcgtgaccaagcatagcaatgcgaaactttgtcgaggcgaatccacgcgcgacgccgaaatcgcgaggcacgcgcactgtgggcagcgtgccttcgccgccccgtgccctcgcgccgacgccgctagagaaaaccctagatcgccctcgccgaggagctcccaagaaacaaaaatggtggcggtggagggatggatgcagcggcggcgggatggagtgggggagggagaagggaggggcagcggacagagagggaggggaaaggctcatcagtgcgcgcgtggtcgacggtgaggagaggcagcaccgttgatcgtgctgcccattcatgagctgcccccaagaacgccgaggacgagcgcgccgaggagagagcgggctctgcggcttcatcatcactgtcgccggttggatctactcccccacctcctcctcctcctagtcgccgccttggctaggtcaacgctgagttccgccgccacgcgcgtcaagcccgtcgatgccgagctctgccacttcttcaaggacgacgccgcacggcccggaggatgccgccaccgccgctcggcccggaggacgatgccgttgctcggcccagaggagaggagagccggcgccggcggagggaggaggggagccggcaccggtgaaggcaggaagggagagccagcggggaagagtggcatttgggggtggaggatttggggatttggccggtgaggagttgggggtttgtgggtcccactagaagatatttgtgggtccaacacgtggtgcttgcactgtaaagagagggtcttcaaagctctttgtcctagctgtcatcttatggtaactcacagtgggtgcttgcaccgtgagtgcccttaggcctctcacagtgcagtgacgtggaccggtgctacaccgcgccagcgaggatttgtgcttgcgtggagcatggtcgcgcgccctagcagagccccttggccccaagcaaagccgcgcggaccctggtccaagcgagggagcgtgcgacaccaaaatccccgggcacgcgtgctgtgggcagcgtcacctcgcacatgcgtgccctagcggggtgaaaacccagaatccctccccccaaaaaaaaaatccactcccaccacagccactctttctccggccaccaagtcaagaaaaggcacgaaaattttcgggatcggaagagaactcaaagaagacggattcaacaaaacaaaaattttcgggattggaagagaagaactcaaagaagatggattcaacaaaacaaatcgagacgtatgtaaaccacatgatgaaaaagaaaaaaaaatccgccgccaacgattcctccgccgcaaaaaaaatcccgcgcaccggtgagccgccgccaaccgcaccgctcgcaggatgcaccgacgcgcgcccgtggcctcctcgccgcggcttcccgtcgcccgccgcccaccgtcaccgtaggtaggggagatgaggtggatgaggaggcggcgcggcaaagttgtcgaggcgtccggggagaagcgggacggtggcggtgcgtcggtgatgacgtcctccatggggccggatgagaacccaccgccgccgccaagaacccgctgccggggacgcctccaccacaaagaacccgccgccaaaaacccgccggatctacgtccccacctcctcctcctcctcatcgccaccgccgcccgccggatctacgcccccatctcctcctcctcctcctcgctgccgccaagaactcgctgccgcctgccggatctactcccctacctcttcgtcctcctcgcgttcactatggaagaccgcgccgccgactgctgcttgggaggagaggagaaggaggcgcggctgccaccacatccgtctgcgtcgaccaccacatccgccgctacagccaccacatccgcctcggccgccgaagggaggggaaggaggtgcgggggagaagtggagcggcggcgcgggaggataagcgaagcggcgcgggatgagaggcaggcgacggcgatggagtagaggaggagaaagtcgctagctggaaggggtaggtggggaagaaatttcgtcccgtacctcgtgtccacatgcttgggtaacgctgcactgtgggctcgatttcctccacctgtgtctccatccaattaaaccacatatatatatgggtgtttgtattgtggggtgaatgtctttaaactgtgactttgagctagggccttatgggtatagaccccatagcttacactgctactgcccttagggcacccacaatggttatctataggctctctacaagagatccatgtcagcatattttcctacttggaatgtattaaatgaagagagagagcaaaactatctactaacttagagatagtctatagagaaaaacgaggcaatgcatgagagagctatagataccaatgtagacatactattaaggtggtttactattaatcgagtctattgctgagatgtacatgttttatagatagcacattactttaccattgcgggtactcttagtattgcatggactaacgggccctgcttctctggagcagctgcagcctgcaggtaggcagacagccacagtaacagtacacactcagctccaccattacacaaggaggaggctgtgtcgtttctagaatcacaagtttgaccggctttgctcgagttccaacaacgtcaagatgccgccatgccggatacctccagctacccccgaccccgagtagtcagtggtagtatacagtacattcaatgtcaccaccaccacctgcctgcctgccttcgtctcagttctcgtttatcgcgatccattctcatttacttatgtaaagttaatttgagatactctctccgttttaaaatataacaacttttaactcttaatatttattctaaaatataacaacttctccaccaacactttcttttgaaccaatcacaacccccgccattcacttttcctatctgccttcactacttaaccaatcacaacactccattattcacttctacctatttttttaataattatacccaactctaaaaatatttatattatggatcggaggcagtacttatgccatagtcgaatggttgaatagcctgcgaataaactgtggtcattatttgtgatacgtatgataaattaactattataaatttaatttgtgataataactgttattcgagggtgatactagagttaacttttaacgaccgtattacatgagcaattgtgtccgtagttatatatgtgtaaaaacttatattaatagctaggagtattggcttcaaattaagctttgtgacttagtatgaataatatggttttgacaaagctccaactacatattatgtacaagtatttttcggagcaacataccgacttgggttctaagcaatctataaaggtgtgataaggagaaggaatccattcatcttgcatgcacaaatttagagaacacggtaatatagattatcgttaactttggatggaaatttttaaatatgattattgtccagacaagagttgtatatcttcttttattgacggagtggttatttgtcttccttttcatcctacggtagctattttttatttgcctttaagctaaaaaactgtataattggttgtaggttccgttgaagtgaaggccggatctcatccattatttttttttacaaaaacattactaggggaaattgaaatgagttgtggagggtgaaattgaaacatttttcaatctcattatctacttgttaacttatcacctacaaccaaattttgaattttaaaattttagagttgattttggactattttcatcattgtctattttttagcattgcaaacaacaaaagaaaaaagttttacctatattttcttttgttgtttttgttcaatttccatggattttccatttctacccaggtaattattctttgctccctccgtccctaaaaggtaaattaagtaagaaaacaaaaaaaaactaatatgcccttcatcaatatggagaaaaaaatgagaaagagaagaaaatattgcttgttaaatggttaaaacgagagaaaataaagtaatattaaagaaatctcataaatatattacttaaaaagacaattctttaagttgaagaggatacaaaaatagagttattaaagatttatacactaaggcttattcagattagtaccattttaaaccataccatgtggtaaaattaacaaatatatggatgcatttagtttgttatcaaacattgataatgcatagtgaattctgacaacaacatattatcctgttctaccgaaatttggtaacattgtcaaacttataaaaatattagtattgccaaaatttgaaaaggtttattttgaaattaatcttgaacaggccctaaaaccgcttgaaaatcaatggtggggtgtgaccgtgtgagctacgaataagggaagagtgcaagacattgacatgctggcctattttgccacgtcaccgtaaaagtggtccaaatcagccattgccaacctaacgaaaattggatgccacatcatttgattccgttccataaactgacttggcgtacaaacgcctgcaaagcttaggaagctgaatagaaaatggcctcagtgatataacaccaaacaagttaagggggtccagcgtgtaatgcctatttacgacacaagaattttgcatgagcaaactttaatttctttaaaatgtggaaaactccccacgtcctaaataggcatcaccattcctcacataaatactttctctgtcccaaaataaatacacttagtacataatgtgatatatatcgtacatctacgaatttagacaaccaactgtttttatgattgatttctctgcagtattgccacgtcagtttttattatctacgttgtacaacaattttgttctcaaacaaccaaacctcaaataacatttcacatccatacattaacaaaagtaaggccaaattctaatccgataaattttgacacatgcattttccatcaagtagaaataaacgcatctaaaagacacaaaatctactgtaacctattacaaccatccataatttcacacgtttaatttgctttttgcataacttatatattatgcttaacttacggtgaagaaggtatcgatggaaaaataacttgctaggtatatttcctttagttcaacccacactttttctttctgttctttttttcctcattgccaaaagaaatcactctccaatctttcctatcgctgtaaagttagcgtcccaattaaccatccatcatggcgtggtggtcgctacgttgcgctacagagcaagggtctaataaggagctaataaaaacacataactttataggagaggttcaatctatcttctatctatctatctatctatctattataaactaaaaatccattaaacttcctacaaacgctctcaagccgccacgtaggactcctcaaacccctcctatgctgccacgtggcattttaatatattagaaatatctagccgtcgatttttcacttaaattaatggatctttattttagaccattagattagattagataaaaaaaaagttagttccccctctcatctacccacatgtacttgcgcctgcggccccatcctgtaaagcaggttgcgtacgtacccatccttttttacttcctattttttccttttacgtttattttcatctgtaataccctacaatatatttatatcacatgatctgttttttttatgttattgacttttcagcgtatatttaattatttgtcttagtataaaaattatataattataataggaaatcctacaaattccaaaaaaaataaaacatccaaccctcgattttcacttaaatcggtggattagtttgtatcattagaccaagatctattaaaaaataatgcctcccaaaaaaaataaattatcgtgtgtacgtataaatacatagtagtactgttcacctgggaaatagctaaaacaaatcctgtgtacatacgtactcatactattcaccgaattaaaacatttctctaatgtgagatgtgcttcgataccctcctaagaaaaaaaccgtatcgattttaaagaagatgaatggcctaacatcataaacgttatttaaaaagcggaatttcatccttagtgagttaattacgcttaatcctattagttcagagcccatatatagattaaaagtctactaaactttctacaaatgctctcaaacagccacgtggctctcttacaaacactccaaggccaccacatggcacgatctaatctcactgtcgatttgtgtttagattggtggattattaaaaatgtgataatttttcctccaaataaactatgcaactggtactgttggccggaagaaaaaaaatagacatctatatatgataaaaaatgatatacccccaaaaaatgcatactttgtacaggtggaaaaaacgacggtttagaataggattttgtataatataaaataaaaataaaatataatactacataatacactgaagtatatgcatgtaagctagatctataatataaatatcaaatatcaaataaatcaatggtctgtaaacatcatcttttaaattatttttaattatacacccaatatatgatccattgtattcatttaattatataaactaacggtgtatacaagttatgttatagtcttaaatacatcacgacaaatcggatcgacatacaataggtaacgttagagactaaaagtccattaagattcctataaatactcttaaacacaaccatgtggcactcctacaaatgcttctacgccaccacgtgacggtctaataaattagagaaaaccataaaaattccgaggaaacaaagaaaaacatccatccctcattttcattggaggacccactatttttaaaccattagattagatttatttaaaatacatcccatgtaacctccccgaataaaaaaatctcatgaatagttgtacatatatatacgtgcttccgtactttgctactcatggaaaaaggaaaaaaatataattacgattgaaaaaagaaggattaaccctaccactgtcccacctaattgttacgagtgatatgtactgttcacccaaaaactgaaaaaaattctcacatatacaatacgtactactattcaccggatcgagaaaaaaagtttcccctgggtgtgtagatactacgcaccgtccttccctctactagcaacattcacccgtccccaaataaacttatctaaattaaatgtatttgagaaaatattatgactacatttgatattaactatattttaatttaaaaattatcagatggaagcatatttagctctttgtccattaaatattctatacacgctattaagccgccacgtagcacttctacaaacgctgctacgccgccacgtagtattttaataaattagaaaaaatcacaaaaattacgagaataaataaaacatccggatatcgacattcactaatatacggtggacccattgtgtttacgtacctctccacctattacctttctctcctattttcctgttttgttagatggaaaaaaattttaggatagcaaattttaaacaattacattatctaaatcatatagctaactctttattggtgtgcaccattatattatattatttactataaaatgtacaattgaagatcgaagttcacgacttcattactttgggtcatatatattctatggatctatcataaaaagaataatctcctcccatcctcctgccttgcgtatatctctgaggttctgactctcccatcctctcctctccaattcaattacctcatcttcttttttttaactaacataatataactatttttttatttataactaaataaataaatcaagatcacattagctatattttactatataaaagttaaaatatatcatttgatggtacaccctatcatttgcatggcaatttaaaaagaactaaaaattaattgaacatatgtattatattataccaaatcactgtacataacaaaaaaatcaattaaataccgtttagagcactaataaatcattaaattaacgtatacattatttttaactattagatctattttttaaaaaaacaaatcttaagttgccatatgtcacattctataaaaaaaaggaaaaatctcagaaatttttagaaaaaatgaaacatcctgtcatcagctttcacttaaatcatttagaaaaaaaatagaaaaataaaatctccaccttctcctcacactaagatgtacacaacactgtggttctctattgttttatctatttaattaaaagagaaacaataaatattgtttgatattttttttagaaacaaagtacaaatgcaggcgctcacaatgtgtgcacactacccctatgagtacttccaagagactagtctgacatattttgagattgacgaaattaccactacgcctcgctatcaacggccacatcgcctaccactgaaagaatttgtcaaatctgggacatgaacccgagtggacaagttccaccacaaggaacctaaccagttgagctatgttcacttcgtaatgttggaattaaaacaaccataatttttaagctacattttcggaataatcctatgccttttaaattggtggaaacattatttctaaccgttagatctatcttatataagaaaaaacaagtgtgtattcatggtacatcacatttaaaaaaacccgacacttgtagtataagtgtcggttttatttagaaccggcacctatagttataaaaggtgctggttttctttttttttcaccccgcagaggtgggaaaatctatataggtgccggttttaacattttcggcacctatatagtgccggcatctatttgatgttttgttttagtgtctcaaactacattagtcatattaagctatatacatccatactttaagtggagctttatgtcccacccaattcattctcgaatgaaccatgataatatatattcaattaaaaaaagaataataccttagtacttacttttcattgacatattttctaaagaaaataagtttaccttcttttcaaatgacgaagaagattacaaataattgcttatagatattacttaaatatgatataatataaagcaggaggttagaaaattatagaagaagttaatgctgacaaaaacaatttacggagaaatcgtggtagatgttctccggttaatatttcgctattataagtgtctcaaacttacggtcatgcccgcgcattcgcgcgggctaccttcctagtttatttaaaattacaaaaaatcaccagaccttaaatatcttgatattcctcacacaaatagatgaatcactatttctcaacaatagtgccagatcgttttttatgaccaagtttgtacaacaattttctctcaaacaaccaaacctggaagaccattttaaatctgcacattcacaaaactaaagccgaatctcagtctcaagtttcggcaccatattttccatcaaataaagaaataaatactctagccaccatatctacaacacacaacaacccaatataacccattataaccttacacaattccacacgttttaagatttgcataactcattacttttaacttatgccaaagaggtgatccatggaaacacaacttgcaactacacatattcccctatgttcaacccacccattttctttcttttctttttgtttcttcctcaccatgccaaaagaaatcactccctaatctctctaatgtccttagaggcattgcctcaattaatcatctgtcatggtgtggtgggcgcttccttgcgtcgcagagcaaataagtttatggatccatcaagcaacttataaatacatggaatttacaagagatggtttaatttcttcaaaaatgcaaaaaagttcaccacatcttaaatatcttactgttcctcacacaaatagatgaatcactatttctccacgatagtatataccacatcggttatgaccaactttatacaacaattttctctcaaacaaccaaaccttaaagaacaattcaattctatacattcacaaaactcaagctgaatcccagccccaagtttcggcaccacattttctcttagataaaaacaatataaacactccagccgccgcatatacaacacacaacaaactaatataacccactacaaccatccacaattccacatgttttgagattcacagaactcattagagcaggtacaataagctgactcagcgggctctaaaacagtgccacatcatcattttcctatgtggatgggagagaaaggatgagagagaatgaagcgagcgactaaattatcgcagggcgctagcgcttctctccacgccgtatcgctcgtgagcagtcgaccctagcgctaaacaacgcggtttgtggggcccgcacatcctcagcccgatcccgtgcggcgcgcgatcccctccccccctccccaccgtgcgcgaatccatttccatcgtccgtgcgtaatcgtcgtccgttcgtcagcgaaaaactcgcccggtgaaaaactctcacgccacaccgttcaacaaaatccggctaggaaatatactccttcctcgtgagctcttcttgcccacgaaacactagtgctttgtatgtagtaatttttatacaacagataacttgattggtatgatctgtgaaatgatgttggtgtttggtgaacaaagttcatctaacaacacaaatagctacaaggatacaatttactactgatcacatacatagatatgtgtatattataattaattatttgattatgagatacagctagctaatggacaatctattgtactagtagttggctttagttatgggctattagccagtagcgggctatactattagccttgctcttatacttaacttatgccaaagagatacacaacaacttgcttgtacacactcccccaagttcaacccaccctttttgtttttctttctttccttttctttttcgtttcttcctcaccgtgccaaagatgaaaaaaatcactccaaatcgccgtagaaggcagcgccacaattaaaaccatccaaccatccatggtgccgtggtggtcgctgccttgcgccgcagagcaacgcgacagcgcaagtgacagtgacacagcgtcgtctcagctcagctcggctcccgagcttgagtcttcctcacgccactgctcccccctccccgccccgcgtcgaacaccttcctcctcccgctataaatccctctcgtctccctcctccacctctccccccgcctctactccccgcacacccgcgacaagctcagctcggctaggccaagacggtggcgagcggcggcgatctggtgctctgcttgggttgagttcttgattttgccgaggtgtatcgatggagacgacggcggcgaagaagctgccgccggggttcaggttcaggcccaccgacgaggagcttgtggtgcactacctccgccgccgcgcgctcggctcccctctcccgcccgccgtcgacatccccgatgtccgcctcctcgcgcatgacccctccgacctgcttcctccaggtgagtcatgagccagctcgccgccgtcgcgcggcgtcgtcggagtgtggccggccggcgctgacgaggtcccgtgcgtgcagggtggagtgagcaggagaggtacttcttcacgtgcaaggaggccaagtatgtcaaggggcgccgcgccaaccgcgccacgggcgccgggtactggaaggcgacggggaaggagaagccggtggcggtgtccgtggcggcggcgccgaggagccaggccgccgccgtcgtcgtcggcatgaagcgctccctcgtgttctaccgcgggaagccgccgaccggcaagaagacggactgggtcatgcacgagtaccgcctcgccggcgccggcctcgccccgtgccgccgcgccgccaccgccgaccacccggcgcgccccgccgagggctgggtgctctgccgcgtgttccggaagaaaggctccgcggccgcgtcgacagccagccccaccgccgacgccgacgacgacgacgccaccacggagcgcgccgacgacgccgcggcgggcgtccggttcatcgacttcttcgcccgcgccgacgcgcggcggcgccgcgcggcgtcgccggtgtcgtcgagctgcgtgacggatgcgtcggcggagcattgcagggagcaggagacgacgagccggaacggcggcgccgccgccggcgacgcctccgactaagctaggcaaggcaagccttgcaagattgtagcaagaaagaggcagggttaagctttgtttgtaagtttgcttaacgaaatcgcccccaaaaaaaaaatgcaggaggacaagacagagagtagctcaagagtgttcagtgtagctcaagatctgttaaaactaatgtatctgatttttaatctgctgttttttgttttgtgttttatttcacagtgccacacgcacccgcggtgctcgtcccaaattcggtgagctcaatcgcaaattcgcattaaattggattagattttttttttacaaaattcagtttgacttaagttggtcccaagcaaatgtgtaaattgtgatttgtgggagattcagtttgacacgtcctaggttttttaattctaagaatcaatttcacatgtcctaaatttttatcatattcataaaccccgcgcattatcaaaagagttgataatctcgtattctttgttcgaattttttaaaagataactatcttgatttcatataaatttctataagatcattgaacatgttgcgagagccggccgaaaatggcaaatttgcgatgggaagctaaagggaatcttctgatcttctcccatttttctcaattgctttggattgattacaaccaattgggtcagtcttctccctttctctctcaatctcccatccaacacggtcgtctgactagattaatcactagggatatgccaccaaaccggatgcaataggggcatcagcatgcatgattaattcacaatgccaccacttatgacaatggagattaataataaatcaattaattaactggtgggtccacttccatctcacacaaaacaaaaaggtaaaaaaggttggaatgttgggcaaggaagaaccgaagaattgaagacgatggatggagatggagaaacaaatgaaggaaagcaggaggcaacatcctcccatcgcctacttgttaccctatcagccataacaaaaaatttaaattttaaaattgattttccgtaaacaaaagtttaaattttaaaattgattttgaggggtattttttcatcgtgatttattttccagcattttctagatacggttataaaagttttgctctcaataaattatttccgattatttaatctatttttccagtgcttttcagccgtacggagatcaaacgatcagcttaatttactttgaagttgatggtgcatatgcagcagaattgttggtggtgaaatgaaatggaaatgaaacgagaactaactactagctactagtagctagggcaacttggtggtagagtatgggtcagcttagcttggaggactaggagactctgacgagtaagaagcgtccatttctaataagatatagattgattttcgttagcatgtattttactatgtaaaaggagtgagtagtgcgcatttctaattaagatacacattttaaaatgttgatttctgttaacacaaatttcggtccgttttaaaacaatatgtttcatacgaaaacttgctatacataagttaatctaaaaatatcaaataaatttatttttcaagcgttgcgctaaaacattttgattttgttttacgtgatttaactttatgtttaattttattagaaacaaacatcaatcgtgtgagggatggtggtcaagcgtgtgatgggagggagggcccctgatcgaggagctcgtcccggtcgggaatattttgcacggattttgtgttgaccgcgaggagaggagggaggtcgatcaatcagggaagcaaagcaatcacatgttgcacggaacgtgtgcgaggtggtggtggccccaatggatgggatgggattgggttgggtggagaggtagaagaagacgagggggaagatgccgccgtgttgctttgcatgccgtggttggttaattgcttggattatgattataggttaattagcctccaacgcaattaccacactgtaacccgctatatactcccttcttttttaaataaatgatgcatttaacttttcaaacgaccattcgcctcattaaaaaaatttatgcaaatgcatgagatatagatcgtgcttaaaatatgataaaaaaattacaacaaaattaataataattatataaaattttttaaatagacgaaatgaggtaatatttgtgttgggttcgaggtgactggtgtgagttgcaagagattaatctttttggggactttaaagaaagattcatgctaaaatttgtgattttgggccattttacgacccaaaaaaattacttccttcggtcatacatattttacgttcaggatatgattcaattgaacttttaaaattccggctatccataatttttggactgaattttgaaagtttaattgaatctcgttgtaactgtcaaatatttatgaccatatagcatattttttctgcttagggcatgtacaacagtgtttattagtggtctctctattatcatgcaagtaaagtaaatttgatagtatagaagaaagagaaaggaggaaagagaaatatggttgttatgcaggtctacggttcagagtcgactcttagcatttattaatggtagagaccatattgtcttcaactgttgtatgacgttagtctctctagatagcgtagagctcatacccgtctctaactttgtgcatggccttaagatgacaaataattttacttagaaagagaagtatatttggatgagggacgaatcaacggaggaaaattagccatgcgacctgcgcttccaacgaagtaaacataaatccacactcgaccatcactgacaaaacttaatttaaaacttagttttaaatttgattttgtggtttgtttatcgtattttaatttccagccaaagcttttaaaccgtgaataataaaatataaatgtcttactataaattaaattgttgtttgttaaatatacgtcgttttaaatagtgggcttagacatttagcggttaggcttctcaaacaattatagcgatagctatggcgttctaaatagaattataacaactaaattatatataaaagcaaatagttaaaatctttcttaaataggtataatcagaaatagtggcatatctatagccggagatttaaaatcatggtttacctgcgggccaaacaattaaacttgcatgacggcttagatataatgtttcatgagcgccgttataacgtgctgcgtgcttaaagttactattccgtacacattcttttgtgaggaaagaatcacacatgggcctaaaatactattcccacagtcccatcttagggctcctttgaatcacagggtaaaaaaacggaggaataggaaaaacacgtgattctgacaggaattgaagtgtaaaacagaggattgcaaaacacaggaaaaacacaggaatgatcgtttgattggagcgtaggaaaaacacaggattcggatgagagatatagactcaaaggaaattttctaagaggttggagctcttgctaaatttactctaaaatccacatgtaatgtgccattctataggaatttcataggatttggaaagcttcaatcctttgaatcaaagggccaaatagaaaaatttcctatagtatttgaatcctataaaattcctatataaatcatttgattcaaaggggcccttaaacgcaacaatgagtttacatgttcatgttcagctttaatgatctgtcttatttgaattttttttattagtatttttttattattagatgataaaatatgaatgataattcatgtgtgacttatgtttttttatttttttttaaaaaaattaaattaggcggacgattaaagttgtacgcgaaactttatggctgcgcttaaaatgagatatgaataacttcactatgacttgtgattcttgtgcgcataggtgtacatggggacaagaaccacacattcttttgcgaggaaagaatcacattagtcatagcaagtacgtcctacagtccttgggaggtacaatgccatcccaaatgtgattctttgaagatgcttaatttctgacagaccagtgcgacattgtgttgcgttcgtgggcactccttttacacgattttacacggaagcacagaccttattattattattattattattattattattattattattattattattattattattattattattattattattattattattattattattattattattattaactgtatttccacaaagtagaaaatttaaatatatatttactattaattccctcgctttctttaataacggacaagtactattcattttcacgctttgaccacttgtctttttttttttgcaaaatatatatttgcaaatacaaaaaaaatacaacatattgttaaagggtatatcatccttatataagcatgaaacttttaataattatagtctaattatttaacaacaaatattagccaaagttgaaacaaataaaatttaataatattaattatttgaaaaccaaggaaggctgtgtttagatctaaacattggatccaaacttccaactttttccatcacatcaacctttcatacacacacaacttttcagtcatatcatctccaatttcaaccaaaatctaaactttgcgctgaactaaacacaaccaaactaaacacagccgaagtactttacacacctgaacacttctacaatcatgtcgaggatatcatcccggtgccaaataattaattagtggttaaaattgtaacaataaaaaatcaatattaactaggagaacactttacatgaacacttctacagtatgtttgggattccgtctattttatgcagcgtacatgtagcagttatggaagaacaaatcggaggttggaattaagctcacgaaatctcccgaccccaaccactgtacgaaatacaaatagtgaagaagcacatgacacagggcatattgtcatgttgcatggcatggcagttaatttcaggttagcctgccgtgcatgacaagcaattagcaaaagcaaagggttgcatcacatcacaggctagggcacatttgcaacattgcatgcaattataattaattaattaatttccctgtcaaagactcaaagtgatctcacgtacacacaccacctgtggcccccatatcacaaacagaggcgcacagcaaccagtttgaaaaactaatcacaaaaaggcaggcaacttgactatggctgtgtttgaggagaggagataggggagattgaaaagatacgtaaaacgaggtgagtcattagcacatgattaattgactattaactattttaaattttaaaaatggattaatataattttttaaagcaactttcctatagaaattttttgaaaaaaaacacaccgtttaatagtttaggaagcgtgtgcgcagaaaacgaaacaaactcactcacaatcacccagatcactcatgaaagaatacagcctataattattttgctaacatggcaagcccattaatcacatgaaccaattaatatggtctgaaattaaactaaaagaaagcaacgcaaaaggacagtatagtactagtggtactgataagttggcaataattagcagccttgcatgcatacgcttgcctgccgtgtcagacaaattaagcatgcaccggccgcagaatatataggaaggtgttacatgcacaccaccaaatccatcccgaatttcctccaaatttaattcccgtttcaaccaaaccaaaccaatcaaatcaagccatagctagctagctgcatgcatatgcgacagtgtggcttccactcctcccgaagcttttgccgtcatcccaatagcgaaaaggtctctctgtctcacaatctatatattactccacgaaagatttcatttctagcttatgcagctgcacaagcacactgctgggaaaatcatttttctagacgaaaaacttactaccttttttccaggcagacaaaaacttcgccaccaccggtcctgcaacatagaatgtcgagctctgtggccatccacttaggaatatctatcttctcagacggaccgcttaaggttccgtctggaaaaatatatttttctaggcagcaccttagtactatgcatgcaggtgtagtgccggagcaaggccagaacaaatctaattatcatgaaaattctatttattttcaatttaaataataatatgaaaaattccacttcatattcattgggcccagacccatgctggggtcccgaagcggtggctccaccatttgtccaagtgcatagttagagacaaaatctttttggtatcggtacatagcaatttatatgtttattttgtttgtctcggtatatatgaataaatatataggttctatgtgtgtaatggaagtgaatatatataatatgtatacagagatagatatgcatatatatatatatacttatataaaaatatatggtgtttttgtcaaagcaccgcggcgcacgttaccgcgagaagggagaaaggtcgcgaaaaggctgacagcaacgtgtcgttttggtggaacgttgacgagcaaagttgaaattcatatcattaaaatgctcaaagaaaaaggaagcccagggtgcgtgtgtgtaaaaggtgcccctttttctgatattgcgttttgcgacactcaatcgatcgagcatctagctagctacagatgattataggtctaatttaattaatctgtatttgttttcaaactagctagcttgcaagattgattctccgtggtacgaccggccgagtttcgaaatggaatcaagcttaattctatctggatttcatctagacggtcgtccccatttgcgatttggcccatgcgtttgtttaactctgatgctgaaaacacttcagaactatttctgtttcgcaaaggccgcttgactacctctgttcgttttagggtatgtttggttgaagggcaaggttggatgggatatgtccatccatgtttttaaggatgaggatatacaagttttgtgtttggttgtatggatgggatgagccaactttttgtttggttgacaggatgaggatgcatcggatgagattaattaactaattataatatcttaattggcataatattacttagttatacacttacaggttggaattaacacttgttgacactaatcttgccatgctaactactaattaatagcaaaacatgctaataccgttaatcatactctaataaactcactaatcaagcactaatcagcgtcctatagaaggtggatggcttcatccggccaaaagaaccggatcccttcatccagcatattgagagaatattccttattctgggccgccatatccaccccgtcctccaaccaaacaccccaaaaaatcaggcggccatctcccatccagtcccatccacccaaccaaacacacccttaatttacttgactagctagtaaaatgtcctttttaatataacatgagagattcgtaaaattatggattggttacgaagatgattgatcataaaacattggatgcggtggttaagtttcgtgtactgacatattgcgcttgatgataggggaataactaactatttgccactcttacaagtgattgtaaaaaatctgtcattggacccacatgccatagacacatgaaggcccatatgtcatagacagcgagtggtaaatccttaattgatttatcttaaaagtgacaaatagttaaatgtcccgatgataggaggggatagaaggagaatgacttcgtttttaagatagtagagatattctatttttattttctatgtcttcccacctgatcgaattttactccgtccatgtgttttgtttgacgttcgttagttcaaaatattatgtgtgacgttcgttagtttaaaatattaagggatggaggtagtacttgtatagaactatttgtaaaatgcattcttttgatgacaaaattatatatgtaagaatttataacctcaaatccaatgtctcattttgcataacacctctctagatatataaataaattttgtatgttagcagccaaacttgttctacaacagtaagtaaggaataactgaggtggaatcagatatacacatgaaaaattccttgtttttagtgtgaagaacatggccgacaaacccacaaagattgatcacaataaacttgtattttactaccatgcatacacaaccaacagtgtggctgactgaggcataccactatctcctaattaatttaaacggagttgataaaaaaagaagaagagatcatatagtacgaaacactaacaacctccctaatctctttacaaatcacgcccctgttaaacaaagagcccaatcaaaccgataaatactgaatgatatatattctatatcgagctaggcccggcagtgtacatgtgtgcatggcccacggccgacgacgcagcaaaacagcacatgaaccaaccaaccaaaatcatcgagctaggttacttgcagcaaatggcaagtgattctgtccatacatacacgcacacacacacacttcacatactccttaattattcatccacatcccccaacatgtacccacatcacttaatgacacatgcatatgcatattaaattaaattaacatcaaaattaagatcgagctaagagatcgaaaacgatggaaggacgccgccgctgcagctagccgtagccgaccaggtcgatcgatcgatcggcgtcagttgcttgcgatgttggagcagttatagcgagctcgatcgaggcggcgacgagcaaatcgccgtcgtgatcgagctgaataataataaaaccgtggcaggtcggtcggccggccagtcgggccagacatgtggctggctgattggccggccggccgatgatgggaaagaagattgttcgttcgctcgctcgttctttcgttcgtttgtacgatgtcgtcggtagcttggttgcttagagggtcagctcacgacaccggccgggagacgggtcgccggtcgcgtacgcaaccgggaggtgatggcgatcgagaggaagaagaagatgatgatgataggggtagctagctactagagctagatgccttagatagagttatttttgtgtgtgtgtgatttgttttggggcggcgaccgggggctgaaaaattcaacgaaagcgaagctgtctccggcccccggccggcatggcacggcctggggttgggttgccccgttttgaccgtctcatctgggggtgtcgttgtccgtcgtcgtcgtcgtcgtcgtcaccggatcgaaggaagggaacaaatataatcgaacgggaataggaaattttgaagcttgttgaaacgagtgacacgcttgatcgagttagccaggaacagtttgtttccttttaattccccagtgcttgctgacagttgtatacatttaatagtctcatatcactagctagtatatatacaaaatgaataaaagatgtataccgccaaatcaaatcacttgtggttcctgtagaagcatcatcactgcaccgtctaattaaaccgatgttaattgctgctagttctcgatcaataaaggtcggcagcgagatacacattactgctagtttttattctgaaccagcaaaagatacatcaaggaccatattaaattggttgaccggttgaaccgtcaactcattaagggcttaatttccccactcctctcacccatagtaccctgttccccctcagtcaccgccactgccactgcaggctcaccctcctttggcacagtacactactacgaaaatcaatttttatacggtcaaaacctatttttgtttgcggttgaaccgtccgatgttcgaaagtatctgcgaaaattgctatttttccatgtaggcgcactcgcatacgcatgcgggtgcttatgccgtctatctataaaaataaaaatctgaaaaaaaaataaaaatgcccccaaaaaaatcaaaactcgaaaccctagctcatacgccagcgaagaatgtgcatgggttttttgccggcaacgtggttgccaaaatccgccaccaattgtcgacatcgtcgtcgctgagtccccgcagctcatcgccgtcgcccctccctacgcctccactgcccctctgcaacctgcagattcgcacgagggagggcaaccgctatcagaggagagtggaggagggcccaccgttgtcgccgtcgacatgcacctcccccttcgagctcctcccgcctagtccgctgtcgctcccgccgtggactgtcggagccatacgtcgtaggaagagaggagaggagatgagaagagaggagaggataagggaggagtggggagagagtgaggagtggagagaggaaatttgatattttagggtggtggtgagctggtggtaggtacgccgtttgtaaaaataggctcattttttcatgcgggtatgttaagagacccacctatgaaaattaatttttgcttgtggatcgtctcttaagaagccgtatcctaaaatgcatgttgatttttgcaagcgcaaccagttacggtttgcctacaaactattgggacaagcatgtgagcgatggaggctggcatgcagggccagatccagatatgatcataggcgatggcaacaatgggaggacagcaaggggggttgttagcgcatacgatgggtgtaccgagctatggcgcggacatagttgatgaggaattgaggagggaatcaacgatgaagaacgtacatgtacatgggtgtgttgctcattaatggtgtttaatcatcagtacctatttctctttgttgattttaaaaccgggagagatgccagtttgaaattggagagagataatttctctagtaataccaacatgtatcctaataaggatctataattaatcgagaatcgcaggagtactgtgccaaacggtccctagaataatcccatgatgcagggaggacacatcacagtagggtggaaccaaaccgaattaaccaaccatgatatgcatgatcacacacatgcattgaccaatcagatgatcatcgtaccctccacgaacctacgacgtcggcacgcaacgcaacgggagggggccgtgtctccatgcatcgatggatggatgggtggatgtttgctacactctcacgtacgcagtcgcagcggtagtcgccgtccccgtctccagcctcccgacgacggacggaagcagctgttgtgcctagctactgcgtgcgtgcgcggggacggcacggcacgttggggttttttttttttctttttgtcgcgtcgcgtttgttgcgttcgaccgtacgagaatatgtgcccccattgaggccggggtcccctccccagtccgtctcgtccttcccatatccgatcgagttgcgttgcgtaccaggagtatgcagtgtcacctcccgcgccgcaccatcggtttacctaatactctctccgtcactaaatatttgacgccgttgatttttttttttaatacgtttgaccgttagtcttattcagtgaaatatgtaaaactatatgtatacataaaagtatatttaacaatgaatcaaatgataggaaaagaattaataattacttaatttttttaataaggcgaatggtcaaacatgtttaaaaaagtcaaatggtgtcaaatatttacggtcagagggagtaagtcaaagcaaaagtctaaaatttaaattttaaagtttattttaagaaacttttgacgtcattctttttagcgttggcttctaaatcgtcacgaataactgtataagagttttaactataaattaatttttatttcctaataaatcgctttgatttcttagggattatatgggtaaccaatgagacttcggcccataggtccggggggttgaaaacttgaaaccagggaagaattaatagagaatctgtctgtcgatggatctccatggagtgtcaaacctaaaatacacatacgacttgtagtgccatgctgcaagaggggggaagcgttttgtttctaatgagttatcgagttgtgtacgctagcgacactgagcgatcacggagatcgcatcccatcctgggctgttgtttatgtttgttttcttcctaacaaattgatggacgaattaatgggctgttttaatttcatctgcttgtcacttttgtcagcgcactcaagtggccttggtttaaaggaagatggaaatgaagatgtagttaattaaaaaaaagatactagctattactccacacaaaataaattaaatttcgattactatatgaatttagagaatagatttatttgttattttaaagtaacttaatatatataatttttgtaaacaaaatgcattgtttgacagttctattatattttttaaacaaaatgcatcgtttaacaattctattataaatcaagttaaaatttgtatgttaatcagaaaaggacaatacctagctcgctgctcaacacaagttgtaacaggtgtagcgttgtagtggaagattcagatactcgtcggctctcggcagatacagtatatatgtgggttattatctttctataatttcttgttttcttcaatttcgagttgatttgagttttttgggtcaaaattggtcatcattcaaacgcacacacagaaaggaaatgaagaaattacagtggttaaaaaaaataatctacccagaggagtgaccaataacaaaccattgtccagtggatcaattaggtcgtttccgtaaaggtgacaccatttttgaccatttatgttttactcatatctaatatttgaatttcctagtcatatataaaatttgattttttttttctaattttgccatcatgttgcagtcggaactcggaactatatacttaacattgataaatatgaaaattcacgatggtccaagaattgtctccgtaaaaatgatactccctccggttctataattcgatgttttggaggttaaagttaaacttgtgtaactttaactatcaataactttaaaagtatttagtttaaaagaacaagaaaaccatatatgaatttgtctttcaaatttctataataaaaataaacatatatttatatattgtatatattataacagaaaaataagggtaaagacatattttgaaaaccgtgtcactgtccaaaacgtgaagaaatatgaaaccggaggagtatagtttacatccctattaccggcgagaggatataaattcaaactttaatctacaacacttttgtgcaacaactagatggttaccaattggtacaaattcaacattttagacttgaacttctatccaaatctaataaccggacagtggtagtattcagaaccctgtctccacgccacaaagtcattttggccaatccctagcgattttcccaagtggcatgacaactctctttccgttatctcaacgtatagtcacttcacagacagtacatgccctatcaacctcacgtataggaaagttgctttaaagaaaatcatagttatctattatttaactttattttagctaatgcttactccctccatcccataaagaatacatttttcagctttttatataacgtttgactatacgtcttattttaaaaaaaatatgattagtatttttattgttattagatgataaaatatgaatagtattttatgcgtgactattttttaaattttttcataaattttttaaataaataagacggatggtcaaatgattgacatagaaacttaaaaatgcgttcaatgtgggacggagggagtaattaatcacgcgttactggatcgcttcttttgtgaacggaaaggtgaagttcccaaccttaaccttatgtacggtaaacaaagtcagaaaaaaccacaacaatccatcaataacacatgcttgcaagcctctgttttatctgctgccggcgccggcccttgcctcttcttggttcctcctgccgacccaaccacaggtgaaaaaggtcacacgcaggacagatatttctgttgcgtgttaagctcacatcaaaacacatatgtttaatgcagatgcagatgctggcacatgggagaggagcagattacatggcaaaaacatcacaacggacaagagctgtccgtgatggcaacaggttactcctcctcctcgtctcatgtctttaaccaaacttgcaagcttgggaaatggtgaccctctgacgtcaacgacataatggggggtgcattgcattttttttcaagtttccacattattgcaatgctgaatagaattctagaatagaggcatctgcataacagtagatgtgagtacactgatctaagcatgatgcatagtggatggaagcaaacagacaaatatgaagcttcagggaagtgatgcaaagcacaaaaattgtggggttcagtggggagaggaagatgctaaagggtgatgtaagcaggagaggaagcatatggcagcaagcaatgatgtatgtgtcctcttgatgaaaaaaggttggatgtgtacatgcatgtacttgttccagttgatgaagtaacaaagcttggaaacatggagaggctttcagcattgtcatgcagaggccttttcaaattgcatttaaacctgtgtgcatgtcatcagattgactttgggatctactgttgtttcccagaggccgatgcggtgtttgatgttgacgacgacgacgattctgcttcaccacaagcccttataactgcctcattctgaaaacaaaaacgtagcaaacagtcattagcatttcactcatctgatctgggaatatgaaatgcaagaatagtagaatactataaggttaagtgataactggccaatagagttcaaagtgaaaacgatagagatgcaacccgtgaacgctattttgccttatctttcgcatcaaaggacagtgcattatcattatggaagtgcacgcaatcacaaatttttaaccaaaacatagtaaaagagcctcataaccgccatccaacaaatattggctcaaattcaatgggataaactgcacaacttggatggaatgtggaaataaataatcatttaggagttaagtggggattttgaggttctattgcagatccttggttcaggactttgcaaattaattgtctagctgataccaattaataataacagcaaattaatgttcttttagtctatcctagggctcttgctccacctcatttgaactgttactgttgcagaaaatgaagtatctaataaaaactatcttctaacaaatcatagcatattattgcccgacaaaatttcagggaaaaagcttaagaggaaagagtttcttttatttattcttggtttttgctacacctcgtttgatatgttctttttggatggaataaaataatctaaacaaatcatagatttaaactccaaatcatacttcgaaacaaaacttatagacaaaagtgaacaatgcacttgtgcatcccatttgaattaaccactgagtaatagttagttgggataatacagatataatgtatcatgagtaaattgcaaaatagtcaaatgagggaacatggtaactttgtaaatgtgagcaaataacaagcaatgtgaaattatgcaaataatttgagttctcaaagctaaaatgatcttcaatcatgcatataaactgaacaagataaataccagtgatgatcgtccaaacaaataacactgtaattgtggctgcaccaacaaacagaactgctaagttgaactcatgaattacttaaggtattcattagggagtaatgacggaagatctggatagttcaactagcatgttgtgattccatatgcttcactaaagttagtctcagtgaagggtattaagtattaactgcatccaacaaactgaataagaacagtacaaaattaattatattggcagtatagttgtttatgtgaccaaacttcacagagaggaagaaaggtgactaggtgagtacagaaaaaggataaaatgttggttcaagtgacaagttggtggtgatcaaaagaatcaagtgatgcactccatgcaccaaatgtatatactaagaagcagtagcaaagataattttttcaacacttgagtgcaactggtcacagactttataactgaccgtggtatctcagcataggatacaatcaagtgccttccctgcatcctacctacctcctgcctagagcaaatcaagtacatccatatctttacagtgcatgtaaagttaatactctactaactctagaaagtcatgtgcaataaaaaagaacccacttccctatttgcatgttactcttcattctgttcaatcaataacacattacaattcactagccttcatatctttaggtattgctgatgaaatcagaaactctttccacccttttaaagtgtcaatttattccatcttttgcatggaacaaacctgcattatttgctttgtaaacaatgaatatttagatataggcatatatccttaacatggttatatcatattgcacctcatatggctgaggcctaaggttctgggaatgacaggaagtgtggtcaaatagctacattttgatttaggaatggtctgtgtctgagactatcagtgttttataaatgcagcaatgcagcataccttgtgaggtcttattatatgttcatcttattcacattttctactcttcagaataaatcgtagatgagaaggtacaccagtgaatgtctgaatccatgtagactcttctcaagagggtgagatttctagggacttcctagcttaatataggtgtagaaactagaaactcttgagttttgtctcttttgtacttttccttactgagcattatgagggtaaagacttataagctacaaacactacatgaaaacgactccaaagagattttgctgtttgcttttgtttgagtcagttcaaattccctaaccctagttagtaatcttgattaatttttttattgtatattagtggaggtgatttcataatttggaggtagaaagataactttttgatacattaatatgggggtcagcataatgcttcacattttttagggccgtttcctgatgtagccatgaaaattaattaacatgaaagttgttaagatcatccccaaagtgggactaaaagttctgcttggtgctacacaaacaattggtatttgagccttgtaccctgaaataacacgcgaaatcaaccaaagtaaatttgccaaagcaaccttgattaatttctttcagcaactacgcaacttaatatatgtttttaaagacgaaagttaaatcttaatgcaagcactttcaatggttcatttgcaatgcatgcaaccaaacttggattttaatacattctagaagtcaggggtccccaagtctgcccactaatctactactccctccatttctttttgtttgacgttggttagttcaaaattgaactaaccagcatcatgcattggatggggccatgggggtagtattaaaaactaatatccatgaaactggaacaggtcacatactcacatgatggtttgaactcataatcaacgcaatgatcacacaagtgaagatgagaagcagaggtagggtctagagacttgatgaggaacacgcattgtggataggatgagggcctgaggggagaggtcagggcttctgcatgtcttttttttattcttatttttctctcataaactggactcagtttattttccatatagtatgatttgaattgtattactgccaccaaacttggggcattaggcccagttactacaaatatctaattcgttcccagttaagaagtaaaatttgatgatgctacaagaacattggcaagtagctgtcctgttaggtatgtagaactcccggagaaattccataaaaataaaatctcactcctctaagagcaggtaaacccttccctatgaaattaacaagttccaaattccaatgccctaactttctactaccagactaccggtcaatctacatcaagtatcctatccaactgcatacttatgcgcgtgaatctgacattggaggtggtatatgaaatttgcccttcattccaaaagaacaaaaatcgagggattgctaaaattatggcaccacattttggtgatcaaaagtaacaagttgttggtgatcaaaaggctcaagtgatgcacacatgcacgaaatgtgtgcatcaatatgggtcagcatattgatgcactaagaagcagtagcaaagatatttttttcaacaatttgagtgcaactagtcacagactttgtaattaactgactgtggtatctcagcataggataccatcaactgcatcctacctacctcctgcctaagaaaatcaattagatctctctctgatgatcgacaatcttcacagtgcatgcaaagttctgtacttagtaactctagaaagccctatgcaattaaaaagaccccccttccttatttgcatattttgatcctcatcctgttcaataaatacgcataagaaattcactagcctttatatcattaggtattgatgatgaaaccagaaactctttccagtttccacccttttagagtgtcaattgattcctgttattcactcctgaatatcagcatgttgacacttcatgagtctcactaatactaatgtaggctctagataaaatttgacctaccagcagaaaaaagatcattgcaaccaatgtcatacagaaagcactctgaggagttaggtggtactgggttctgatgtaacactaagatatataacttatcaaactcaaaagtactgaagtttgcgtagacaaattttgcatggaacaaacctgcattagttgctatgtacacagtgaatatttagatacaggcatatatccttaacatggttatatatcatattgtacctcgtatggttgagcttgagatctgaggttctgggattgacaggtggttgtggtcaaaaaggtatgttctaatagagggaaatgatctgtaatctaggagacttatcattttttttttataaatgcatgaggtcttattatcttttcatcttatgcacattttccactcttcagaataaatcacaaatgagaaggtacaccattgaatgtccgaacctatagactcttcagaatatggcttacttttattttccctctccacatcaatggttctcaagctaaatatatgtgtagaaactctttagttttgtctctttgtacttttccttactgagcatgcttatgagggtgaaaactcattaactacaaacactacaaggaaacgactccaaagagaatccactgtttgcttttgttggtatcggttcaaattcccttaccctagttagtaatcttgattataattttttgttgtatattagtggaggtgatttcataatttggagccaggaagataactttttgatgtatcaatatggggtcagcataatgctttacagtttttgagagctgtttcctgatagaagttaatgaacaagaaagttgttaagatcatccccaaagtggcattcaaagttctgtcagggctatacagacaattggttgttattttgagccttgtaccctgaattaacatgcaaaatcagccaaagtaactttgctaaagtaaaccttgtttaatttctttcagcaactacacaacttaatatatatatatgtctttaaagactaaagttaatgcaaccactttcaaaggtattatgcaatgcatgacttctgtcaaagacggcaataaattgtcacaataataaacttctaattctaagcagcacaaattttcacctatgcaaccaaacttggatttttatagaagtattaaaaaattgtccaaagcttccataatcattactttctcatgatcaggtcagaggccctcaaagacctgaaattacccgagtctgcctttgcccaataatctacttccactattaacaaattaagtccatggatagtatcaaaggaagaaaattgatatccatgaaaatgggtaataaaatccacaacaagatgaacacatccttcctcatttttcaggctactgcacacctaatgtaacaaggatttcttttgccagttgccatgcagtcctttactaattattacaacccagggcccaggcgcctacaactttactgtgtcatagcccaggaaactcaacaccttgcactgtcaaagtgcaaaagcaacaggggtgtgtagcagcaaagagaactcacatggatgatttgaacccacaagcaaggcaaagatcacacaagtgaagattagccttgatgagaaacacacaatgtggattaatgggcatataacagatgggaatggtattgaggggagaggtcagggctcctgcatgtttttgtttgtatttttctctaataatgaactggacttagattttctccaaaattagagtttgatttgaattggattacccgactaccagcaaactcaaggtatgaggttcagttagcacaaacaaccaatttgttcctattactaagaagtaaatatgatgatgctacattcaacattctcaagcaagcagctttcctgttaggtatataggattattcccagagaaattttttttaaaaaaatccactcctctaagagcaggtaagccctttcgtatgaaattaacaagttccaaattgcaatgccaatgccctaacttctactaccatactaccgattaatctacatcaagtatcctatcgaactgcatacttatgcacgtgaatttgacattggaggtggtatatgaaaggaacaaaaaccgaatggttgcctccgtccgaatacgaggtccaatttaacatccacccgttttcaccactgaggctgttcatccccaatcaacccttctcctttaaatgactaaattaaaaatcacaaacaagtacttccggaatcaagtgcatgtccataccaattatatactactagacacaatcaaactacccaaaatgttaccaatcctagattacaccaaacggaatcactgaaattgaatttaaactgggcaccaaaataacagaatcgttgggagcagatcaccagaacgcccccccccccgcaagaaacgttcatccacgcgggtggggttcgcatgggggtaaacgtgaacggagatgaaagaggatgggggagggcgcggccatggggggattgatttacctgccagaggcgcttgaggcgcttcttggcgttgttcttgcgggtggtggtgagcttgatccgcttccagagcagtcccggggagtcgttccgcttcaccacctccagcgcccgcgtcgcccagaacgcgccggcgccgccgaacatgccgcctcccgccatcgccctcgacgacccgctcgctcctccgtgttcttgctctccggcggcggctcggggagagaagtgttgagaggggagaggggagaggagaggggtttgggacttgttttgggttttgggcctccggcccagtgggcccggttagtataagcgctgaactgagtctggctcgctgccagtgggacccccggtgccaaaacgaggagaactacgagtaataaggcacatgattaaccataagtgctacagtaactcatatgtgctaatgatagattaattagctcaaaagattcgtctcacggtttccagacgagttatgaaattagtccgatgtgatatttaaaaattttcttttcacgaattaaacagagtccgagttttttaagggatggagagagtattcctcactttcccttgtatcaacgacaggcaaacaaaaacactttcactactcatgcatactggggtgactagtcgagctgtggaagccactttcactactccatctgtcaaaaaaaaaaaaaaaaaagacaaactctagtttccgtgtccaacgtttgatcgtccgtcttatttaaaaaaattatgaaaaaaattaaaaagagaaatcacgtataaaatattaatcatatttaatcatttaacaacaataaaaatatgaattataaaaaattttatataaaacggacagtcaaagttagacacggaaatctagagttagccttttattttggacggagggagtacgccatgtctgactcagtctgtcttactgtcctagcctgctgttgctctgtctaagctagtgatagcagcaaagggcattatgggattttattacgtcatgggattttattatgttgctctcagtacgtgtcatgatgcataataagatcaacacgtgctgtactctggctgctctcagaagaaaaatatgaatcaacacgttcccctttgaattgaagaaaaaatagaggaaaaacaaactatttatacctttgattcgtaagtataaatgagaaaaggaagcacgtagaaaacttttctatttctatgattctagaggaaaaacgtaggaaatttaacatctactctaacctcttggaaaatttcttctgagcttatctctcttatctgattcctgtgcttttttttggaccaatcaaatagtcattcatgtgttttacaatcctctgttttatacttgtattctcgtcagaatatagtgtttttatattcctccgtttttttaatcgtgcgattcaaaggggccctaaaaagtgataattggtttgtaggaattaaaacatatgaattttataagaaatcctgcatgaataagagtgagaagggacgaagagagaacatgcattgacttagcaaatgaaaataaaatatgaggtgctagacggtaatgcatttcataggaatttgacatctccaaatcttatgatccaagtgacctcaattggaaaaactcctgtggattcaaatcctccattttcctttcaaacatcctccaatccaaaggagaccaaaagttctttgaaaattatgaacagcttgttattttgtaaacatatatactgataataactttaacttttcccctaacaaactatatacatacagtttccctacctggtaatataatggttccaggtccctttcaaagaaataagtaatggtttcagatttccagcccacaataataaccagtaggtttattttgctttacaaaaggtttttcattcattccgaaaccaagagtgcaaagtatacaagaggcgtgattggagaaattcaacaaaatgcaacccggcaaattaaccaactattcaatgaatagtaaggaaaccacttatttattacttcaaaaaaggaagacaatggttatctaaggaaaacatagtttatataggagactatcattcatatcgaataccatcgataaagattaaattgaagtatgaaggcaccgatatatggctaacacaaacacacttccatatgccacagtttctttttcggaagcattcatgccatagttgataattagcattaataatagagatagcataacgaaacaacaaactcttgaacatgactacgcaataatttgcatcgctcaatcctgcggcctcatactctgtctcccaagaacaaaaaagtttgctatgccacgatgataaaccaccattctccatacgagtacacatgtagtggtccagaagtcctatagttagtcagaacacaagcagtgagaaatcataggttacaagaaaatggacataagctgcatgaattaggaattaagagcagtaaatcagtaccagtgcggctttgcacataaaaaaataaactttgatgcagataaacaggggggaattagtgactcgcagagttgcagtatccaaatggagtaacatttaacctgcatgagatgaaaagttagcaaggattgttagtatgttacccacagtccacagagagagagagcgaaagagcatatatgcaggagcattacatgatttgttactatgcaaggtagctgcagaactgttcatcgtcctcaagcagccttacgttcttgaacttcaacagaaaccgaacagcaggaacatcaaagtccaacagaaacccagccatgataagctcagcgagagcaggaacttggtctgttctctcaaacaacaacccttttgatatctcctcagcaaaatatgctgcacactgtaccctctccgcattctccagtgacgccgacccgaaattcctagtcatgaaaattctggattcctccctttcccagcggaaaatccgtgcagatttaacgttcaagcttcttcctgaagaaagccctacctgatagctcactgtgagaggcatagctgtctcatagacaaccacattggtgaggcatgataccatttcatgcctcttttcagcaggaaagtcgagagcaggatctgcaagaaatgctagtatgatcctgagcaagccaggtttgatcacggttcctttctgaaccatggttagcgaatgatcgagcttcaagtcctcagattcatcccgcgtaacaaccttggatattttctggacaccaacagtgctataaatctcatttagttttgctggagataagagagacaagctagctggtggataccatacaaataaaggttgctcagcctgcatcctgaacaaatcctccagcagcagatcatctggaatgaacacatcctgcttcggaagtagcaagatccgatcttctgagcagacaggaacttttgtgatggatccagcaaggtacttgccaatttctgtgttccaattcttatcaacaaattcaaagaaagcagcacaatcttttggtgtcggagtggatttggagttctgccacatgatccagagcctgcagtagtcgccaatcgttggatgacccttcacaccaaaaacagttttgaaaaacctaagtagcttgtagtcgtaccatgttaccaaaacatggagctgagagccaaagaggctatttctgtcataaagaacacaacgatctgggctcacccactgtccattatcacttccctgtggtacccaaatccaattatcgttagcattgcgaggcttccaacgtaatgcctccaaatatgagtatatcctggaaattgcatcgccattagagcaactctttaagcactgcgccatcagcgcacagccagccctagcatccacaataactcctaatgtgtgcagctcactctcatatgacaatatctcctgcccataaaacacttcatctacgaaggggccatcatccctgtgaagagaagagcaggcaggaccaaacaggagacaattcttgggatgcctatatcctgcagtcgtcttcacccacctcaggttgattgagctcatgaaattgtcaggtaaagctgagccaagcattttccagctcctgatgcacttcagcaatgatataacagcttctggtgtaatagctgaagcatcatgaggaattttgagtccagagatgacaaagggtgctccatgttttagttcagccttggcacccaaggccattagttcatctctgtagatgctgatacctttcccctggccatactcagaataataataatcatcaatgaagggtagattggaaattttagaaacatgttcccattcagaaccaaaaataattgcttcctgaggagctctgaatccaagtgatgtatgcagccatctctcatacttcatgcaattggcaagatcaacaggtaactttccatgcttggtactaagttctctgtagcattccagcatggcaactcccctctcctctgtaaacaaggaagaacataacagtttcgtgactctacaggcaattgccttacttgcctctataaagccaacgattacactaaccttccttaactctcctgcgtacaccctaatttcatctccatagaacttcaaatcaagcagcggtacatcatcaacaatattcagaagacatttccaatcatcattaacgaggaaagttccaggaggagctctgaagccaagacaagtcttcaaccatttcagctctttcagctttttagcaaaatgttgaggtatctcagcatatcgaaggcacttgagcatcagtatggtgacatcaggagtaatttgatctctaatgagactgaagttgtcaactagcagctggtaattctgtttaaaggcaacatgaactcccagtagctcaagctctggtttgtactcaagtatgtcctcaccataaaacagggtgtcaataaaaggcaatgagctgatgacagaagcattttcccattctgagttaaacaggatagaatttactggcaatctgttcccaaggcaagtcttgaactggcagccctttttaattttttcaatgaaatttacagaggtcaggttattctcggtcaggtttctgataaactgaagcattgcaaacatattgacccgagaaagagcaccgtttgatgattttgacataagatagttgacaatatgtacagatgcatctgcaaactcaaactgcactccaataccatgcagctcgtccttgtatgcgcttattttattttcataaaattcttgatcaatgatggccacatcagaaaatacagatatgatctgccccaaatttcctgaatgtgcaggcaacaaaaaagatcgtgacggagaactgtacccaattgatgtcttcagccaacttccattcctaatatagctcctgatgttatgaggtagttggacacctatcgatcttagatccttgatccactgtaggagtaaaataacattttccatgctcaacggttggtcggcaatgtgtaaattagcatttgcgaactcaaactgcactccaattgctctcaactcttccacgtacccacgcagtttactcccatagaattcttcgtcaactatgggcacaccagaaaaaatgaattgaatctgtagcttgcttccccatcctacacttgatagaaaagattctgatggcgacttgtaaccaacagaagtctttagccacttcccatttctgatacagctcaagaagttatgtggtagactgatattgcttgatcttatattcttaatccattgcagaagcaaaagtgcattctccctagctaaaggagatgaaacagaggggaaactagcattgggaggatgcataaacggcacatccattgcttgtgcataagtccttaagaatgttatgagctgaccttcaggtgtataatttccggcataagttccagaagacatgtaatctgctgatagatcaatatacttttgagatctccaaggattcgttccaatcaaagtaaaccagttgctcccttcagcaggaacaagcaaagcatttttctgttttatcacggatccacatttatctaccaaaggcattgcatgagacaggttgataatgctcccctcagtaatgtatttgtttgcatgtgagtgataaaggaagtggcagtaagcaatagcagaacttgccttataaatagtcttcgaagctgcaaaagcatattcatagaggttccgaatttccagcttcgcaattttctgaagccactcaataatctgtgttctcctgcaaaacgtgttaagagacttctgtgtattcaggggcagaaagaacatgttagaggtagttgagagttccttgctccagccaataatccatggtaagtcattaacattggatgctatacaaatcctcttatgatgcatgttagctccacttacactgcaatatgacggacaatcagctccagtcacatattttatgaggggtacatccgacatgcttgtattagaaaacttcaaccaccaattatcagcaataaaagataatatttcaagataaatatcttccggagcctgtgtcacaagatttgaaccatcaataaacttaccataccattcatggttgacatatccaactcccagaaatcctaatacatcattgtattccttgctatcaagataggagttcaggacagaagtgccatgagaacataaattctgcagattaattccacgtttcttggccatgattagaattctccagaacgcaccatccagcctagcgacctcactgggtttgcagaaaaccttctgtgtatcaaaggactcgcaaggcattatatctttagttgcaatattgttttttattgacaaccttactgaatcaaacacaggtatggaagaagttgctactggcagaaacctaaaaattggaggaagggcaaatgatggggcattgcttgatgatttcaaaagagcttcaaatgcactgacaaaagcataaggtacgcaatcaagtataccacgattccattggctgtcaagcaggatggactcacgggatgaagcaagaaggaaatcagcttgaataatgaagggcaaattagtaaccatctctgttggcaggaatgcatagacaccaggtgaccgtgctcctctgcttagtcgttgtccatgaggaaatgctaaggtaatcacccatttatctacctccattcttttcttatctctgcactctggtttgaccacaaacttctgcttccacatatagtaggtacactcctctttatcaccccttttattttcttgcatagctagatggagagtgtatgactctgcatttatatccttctgtgtcttatagtccacttcacttgagattgaaatctggctaagcttactggcctttggatcatcgtttatttccctgacagacagctgcctaattttcgaaagaaacagaagaatttcaggatgcgtgcttgatagttcattcttcactgggagtatcttatcactcttcaggggtaagatgatagtggtcgtaggaagctttttagaatagccatataccgcatgtatgtcatcaatacttggcttctcatcaacccatttaggaacaatgtatccgatatcacaatcttctgagggttcttcattaaattttatctgatacccattgctgaagatgtgtggttgactagataccagaaatacacttttaaatccaatacctgaatgaaaggtgattactttttcttagaaggacaaacaaccaaaaatgcaatattactatagtacaagatgttataaatgtagtcttaaataccaatgggatagccttaaaaaaatcaatgttatttgctgcaaaagcaaaagtgttggttaccatgcaaattctaatgcttgattcagtgtataacaagttgtagggacatctttagaccatcgacaaggtatagatgactagtaaattcaaatgtactattaacaccaggtagaggtaagcaaatctttttccagagtaaaaagtgaaccaatattcatatagtcacagcaaaaataggaccaaaatattgatccagcctgccaaaatgatcctaattcaatacgaatgttaagaaactgaaatagccattacaatttgcattgcaggtccttgtatacttgtctaaatcaggtaaaataataaagtaagcaacaggggtggcactgccaatcagactaatattctgacagagattacctttttcaccaatatagccaagatgtctgtttcctttcttagtggatttaccaatcctacaaatggattcaacgtttgcagcagaaaatcccctttcattattgaagacaagaagagttgaggcagctcctgtagcagtgatgtctttcttaatgataacgaactccagtgcaggttccacatctgatggatactcattatcctccgcattctaccaaaaaagtcagcacattagagaatgttgaatgtctagttgtatgctctctatcactaactaataaatgttacccctggtacagtttcaatatttcaacaggttataatgatcacataatgaagaagacataataataaaaaaaaccgagatgtcttcaattatatgtgaattcagcttcaatatcgttaataattaaaaatcaagttcagaaattatattgctctaactagatcatgcccaggcaacaacagtaaagggcaactcctgatacattagcaaatctcgattacatggtgcttttggtacctctacatcctcacagtctcatttttttacagagtccactgctgaatagtgtgatataagttggaaagttaaggtttagccaaagtaccagtgcgcttgaagatattacacaagtgaagaatgctgctagcctcagctgacaggtaaaataaagtactatccaaatgctagttgtaggaatcatacctcttaatttcgtccaagatggaattaattctctaaggtcaaagtgttctattttgagaattccaacccctcgtaactaaagtttagtgcgccacaacacaaactggcttttaagtaacaaatcacttcagcggcaatccgacgaacacctctagggcgtcattaggtggtgacagatttgcagggcacaagaccaaaaaaataataataatagaaaacgtgggtattcctcaaatcaagagaagcaggagggatgccaggacaagagacatcggaaaacagtagatacgaggagaaaatcgaaccaggatgaactgcagctcctaaggatttcgcaggcgcgcgttgcggcctatcttgatgttgggggggaaaagagagagtagactaatttttgtggggggaattgaaggatcagagcggcgttgaggacgcaggttgtctgcaacgtgtgcagtaccgcagaagatctgaatgggtttggcgatgcatcagtttttcttttcttgttcagaacagagactgatctcatctcattgatcaaaaaaaaaaaaaaacagaacaggttgcgtgacctgccaacgattttcgagagtgtgcatgtattatactatttttcttttcttaaaaaaaatgaatcaatagagcaccggcaatattttttataggatttgattaattattacttattaataaatgttttccaataccaattttatgtctttttttttgcaggaagaaataatgcagtactcaatcaaaatatcctcagagactagcttttttttttgatcttctcacagactagctttgatataaagtttcaatctatgttagcaacaccaaagatcgcagtgcaaattgcaccaaatgctaactataattgatgttggcccacgaagagtttagttttataaattagtacaatcaaagagctatttggagtttgttaacattggcaaaggcattcacgataagagaatctatcctatgtcactaagtttgtctcaattaaacgatttgatattaactttgttcttttataatatactagcgagttatctacttttctacaatgtgttattgggctaacttttttttaaatacccaaattcccttatagacatagggtctgtttactttgatgctattttcaaccttaccaaattttagtaaaattaccaaaaaagtgtctatatttagtttgctgccaaattttggtaactatataagaaatcctaccaaaattttggtaagttgccaaaattttggcaatgccaaattttggtaaggttttttttggcatcaaagtgaacatgcccatactccttccgtcctaaaatataaaaacttttaacccttaggatttgtcccaaaatataacaacttctccaccaacattctcttcctaaccaatcacaaccctccaccattcacttttcccacctacctctactactcatccaatcacaaccctccaccactcacttctccctacttttttaataaccgtatccaactctaaaacttcttatattctgggacagatggagtaaattttaacaattgatttatcttaacataagtttagaaaaaaaatatgttttttagcctcgttacataagttgtgtaaaatttcaagatttttgcattctatttgaaaagtataatttatccattatatgctatctataatgttttctttctgttgttatttataacgcaaattatctttcatatgctacacaaaatatttttgtgctattatcttttttgtaagcagtttccctaaaatatactccttcgttccaaaatataaaggattttggagagatgtggcacttcttagtattgcgagcctgtccagattcatagttctagaaaatatcacgtcactccaaaatctcttatattataggatggagggagtaccacacgactattttttttagaaaaataaaaacacacaaaaaaacttgcaacaaacttccattttgtttgaggagtcatacatttagttttcgccctttttttaagtgcttcgtactagcactctataagacgttgatgatgccgacggtgcttgcatatttcaaatggaaaccggtcaaaaatcaaagcactaaactttaatactttgatgtaggacgaaagtagatttcctggcatattctgaatggttttcgagaaattcatcaaatttcaaacaataaattcagcgaaaaattgcctaaaaacaatcatcccatcagggatcaagatgcagatcgtataggagagattatatcagttctgttttcccttcatgcatgcatgtatgaccatgagagaaaaacacagagattttcttattcaatcaaacatacgatatcgactcgcgcattaattaattaatttttatctcagaaaggaataattaacaatgggattagcaccagggttcactctatcgttttcggactttgtttcgggggtcaccgaaatttcggaaattttgagcaaaatttagttgaatttaaacaaatattacccaaattcatgaaaaaattgaaaaatttaaaaatttcggccgaagtaatatcgtatcggagacgaccgaaatgaccggtcagaaatttccaaccctgattaacacgcacgcacgcatggatgaatattcaggtaaatcctgcactagtactatttaagtgatcagatatacacccacctggatgagctccatgaggaaatggaggtccttggagtagagctcctgggagaggtaggtgaccgcctggtggatgtcctccgccagcgggttcctctcctctcgcccgatgtagaatcgctcccgccggatcctctccacgtgctccctcgccgccgccgccgtcaacgccgccggcgaggccatggcggcggccgtacgtcgtagctgagacctagattgattgagctagctaaccgatcgaagaagagaaagagagttcgctggccggaaaggaggaggagcaagcaagcaagcaaagctatctgctgaattctgaatggcgctccgtacgttatttgttgagggaggcggctgttgggctgcttgccagtcgaggaggcgcgcgcgtactcgtgaatcgatcgatcgatcgacgcgccggcgcctcgatgatcgcgcgggaaggtgaaccgccggggtggggtgcatggatgcatgcatgagatttttttttttgtaattatactgttcaagttttttctttctgaaacacgagattcgaaccggtttaaacaaatagacagtcgtcacggttcggcagcgcgaaatcgcaagaccaatacgtgatagagacgacagcgtgacgacacaagtggtctcgcaaggcgaaaacgcgagaccggtcagtattggcctcggtctcgctagtgggccaaatgagatggccagaatggctgctcatgacacaagtaatcatgccgatctagtacgtaggtacaacacctggtacttgtaggtattagccgtgatatctctaggtatgaggcctgatactacaagtgccagccaaaaataacgtgttgcacgacttacctggacacaatgtcagcgagttgcgcaatgggggtagtgctgatgggcggcgcacatagccaccctcattaagtcctactatatacgtatatatgtaagtatattactttgaatacatattttatttgattgtatgtacacatatcaagtttatacgtacgtataaaaagtatgtatgtataaacttcatatatattttttcaattttttatatatgtatgaattgtattcatataagtacatatacactttagacgtataaaaaaattatacatatgcacgcaaactttacatgtatacatataaagtttgcaggtacatgtacaaaactttatacatatacatatgaaaaatagaatattctgtggccctagctaggaactgtccgcgtgcaaagaggcgcatggtttatcactaattaacgattttcacataatgggctagcgaggagcacaacgaatctccacatctagtcattttgactttctgctccatcagatctactaagaagaagggagggcgaggaaccctcatgtatcgccattgaaggggagaacaccgtatcccattccatggccaccagggaaccccgactgcagccgtcgactctcttggggtgcacggagcaaagcgaggagtgaagagtaggaaaatgagccggcactggcagggagaggtgcgaaccattctagccggcgtagccgaggaggaagatgagagggaggagggagaacgcgaggaagatgagtgccacaggtgcgaggaggaaagcgatgggtggattgtaaaatcaaaggtgtttttgattattattctgtgatgaacaattgggcattggagattattggttttgttatttggaatttatttattcacgaagtggtttctttcttgtactagtgggtttcctaaggtgtttaggactcctagtatgagtttggttcgtggctttaggctgcctacctcatgtataaatagagggggagcgtgaggtttcccggtatcgctttagagagcaattgagttgagttttgagttagggtttcgagtttagtcgaaatttttgtaaggagtgctgttggtgcactttgtaaacacagagagaagtaataaagtcgccatctactttaagagttcttcgatttgtgtttcaccgggtttcggcggtttaacagccgactcatcggcggtccgaccagcggcaaggcggcggtcagaccggcgggagcaaggcagttggaccggcggcgacagcaggcgtgacaggcgacttcggcggtcagaccggtaaatctataccggtcagaccggcgacattcgagcggtcagaccggtaaatcaatctcggtcagaccgacttccatcgatttcgagggtaacttttatttccgctaaaagttcttggtttttgggtataccaaccattcacccccccctctggttggcttagttcttgtgattcgatccaacaagtggtatcagagcctcgttttcttctttggatttttatcgatctaaagtttttgccatggctactcccgctaggttttcaactaagcctcatattttcgatggaactgattttcctcattggtgtagtaagatgcaatcttacattatggctgaaaattatgatatttggaggaaagtttctcatccttatgtgattcctgaagccattaatactgatgctttaaaaactgaatttgaaaacaattgcaaagctcgtaatattcttttgagtgggatttctcgttctgattatgttcgtgttgcacatcttgaaactgctcatgagatttggaatgctttgaaaaactttcatcaaggaacaaataatattaaagagcttcgtcgagatctttttaaaaaggagtacattaaatttgagatgaaatctggagaggctttggatgactatctttctagatttaataaaattttaagtgatcttagatctgttgattcttcttatgatgctaattatccacaatctgagatttcttgtcactttttgaatggtctcgacatgtctatttgggagatgaaagttacatctattcaggagtctgttaacatgtctactttgactttggattcactttatactaaattgaaaactcatgagatgaatattctttctcgcaaagttgattctaaatcgagtgctttggtttcttcttcttcttctttggttgttgatgcttcttcatctatgcctttttttcttgctgcttttaatgccatatccgatgatcaactcgaacgaatcgaggaggaggatttggctttggttgctaaccgaattgctcgagctatgaataatgccaggaacaggaaaagaggtggtccaaatcgttgctttgagtgtggtttaattgatcatcttcattcgcattgtcctaagcttgggagaggcaaaagagaggacaaagacggtgagaagaccaacaacaacaagcccaacaactacaagtcgaagggttctaaccaagggaggaagatggagaatcttaggaaggtttttcaacaagtttgcgccgccttcgaaccactaagtgatgtagatggtgaaagtggagatgatgataagggaaagaacgtctcggatatttgcttcatggcgcgtggcgaatctgacacagagtatgaagataatgaggtgagtgcttttgaagaagctattaatattttgagtgcaaaaaataaaaagtgtgagaagatgtataaaaaacaggaatttatcattgaatctcttaagtctgaaatgataggttaaaatcttttattcctaatgatgatgattgtgaaaattgtgaggttttaatgaatgagatttcaaaaattagagatgttaatgctgcacatgatttgaaaaatagatcttctcttgcttgttgttttgctttgcacacacgcactttggatgagttgtttttaactaaaaagttgttgcaaaaatatcaaattgcttttcatgctagtttgatgtttaacatgatttctgctaaaaagttaaaacaacctcatgatgttttggattgctcaacatgtaatttgaataagatgaaactaaaagatgctttaggtcgtgttgagtatatggaagatgttgtgaaaaacaatgaagtgttttcttgccccaaatgtcgtaaaagcaaaggtatcatggtagattgtgaaaattgtgctaatttggaaaaagaggtttcttatttgaaaaattctttgctaagattttctgatggtaaaaagaacctcaatatgattttggatcaatcaaaggttagcacaaataaccgtggtttaggttttgatcctcatgctcataatgctagacatcctcctgttgtgttaggtgttggtgctagaagaggtgagattttggttaaacctgatactaataaaactgtgtttaaatctgctggtatcatgtctactatgaatgcatcttcttcaaaattcaatgttgtgcatgcaaaacctcctgtttctgcttgtgttgctaaatcttcttgctctaacaatgtgtctaaacaacgtgaaaaatatgcttgttctttttgtggaaaagatggacatattgttgatttttgtttcagattagctcataaacagaaaaaggagagagagatcgcttttgcaaaatcaaagtggcaaaaatcgggttttccctcgaggaaaccggtcagaccgcagtgcgtcccgcggtcagaccggcgaccggttagaccggctggagagcctcggtcagaccggacaccggtcaaaccggcagtacagaggcggtcagaccggcctctggtcaaaccggtcactgtacctcggtcagaccgcctcggaggaatttttctgaaaattctaaaattgattttgcacgtggatatatgcctattggatcttctggtcgtgtgtctcagtactggattcctaaattcttattatcatctaaccccagtactgaggcttcgacttctacttgtgtgtaggctttggtggcaaggaaggagaacgtgtggattgtggattccggttgttcgcggcacatgaccggtgataaaaattggttctcctccctcaaaaaggcatccaagactgaatcaattgtctttgccgatgcttctactagtgccgttgtcgctacaggtttggttaaggtaaatgaaaaatttgaattgaagaatgtagttttggttaaggatttaaagtacaatttgctttcggtttcacaaattgttgatgagaattttgaggttcactttaagaaaactggaagtaaagtttttgattcttgtggtgattctgtgctgaatatttctcgctatggaagagtgtttaaagctgattttgaaaattctgtttcacctgtgataacatttttggttgctaagtttgataaagatgtgatgttttggcatcgtagacttggacatgttggttttgatcatctcactaggttaagtggtttggatcttgttcgtggtttgcctaaacttaagaaagatcttgatttggtttgtacaccgtgtcgtcatgctaagatggtttctacttcacatgctcctattgtttctgtgatgacggatgcaccgggacagctattacatatggatactgttggtccagctagagtgcaatctgttggaggtaagtggtatgtgttggttatagttgatgatttttctcgatattcttgggttttctttatggcaactaaggacgaagcttttcaacactttcgtggtttgtttcttcgatttcctggttctttgaaaagaattcgaagtgataatggtggagagtttaaaaatgcttcatttgaacaattttgcaacgaaagaggtcttgaacatgaattttcttctcctcgtgttcctcaacaaaatggtgttgttgaaaggaaaaatcgtgttttggttgagatggctagaacaatgttggatgaatacaaaactcctagaaaattttgggctgaggcgattaacactgcttgctatattttaaatcgagttttcttgtgttctaaacttggaaaaacttcttatgaacttcgatttggttatcaacccaaaatttcacatttgcgtgtttttggttgcaagtgctttgtcttgaaatctggaaatttggataagtttgaggcacgctctaccgatggattgtttcttggttaccccgcacatactcgtggctatcgtgtacttattttagggactaacaaaattgttgagacttgcgaagtttcttttgatgaggctagtcctggtactagacccgtattgcaggtacactgtcacaggttcagggggaggatggtcgtatttttgaagacgagagcgactacgacgacgacgacgagtcggccggtcagaccgggcgccaggccggtcagaccgccggcacacctccggttagaccggctcatgaggagcggtcagaccggccaggttcgtcgggttcggatactgttgatgctgatcgagatggtcctccagagaagtcaacttcgaccagtactgaaacagaacgtggatcaacttcagaagttgctgctcctttgcacattcaacgacgacatccgccggaacaaattattggtaatataggtgagcggactacaaggtcaaaggtaacggctcatgatgtttgtgcaaattctgcatttgttacttcttttgaacccaaagatgtgtcacttgcattaactgatgaatcgtggattaacgccatgcataaagaacttgaaaattttgagagaaacaaagtttggactttagttgaaccaccttctggatataatgttattggaaccaagtgggttttcaaaaataaacaaaatgaggatggtttgattatgagaaataaagctagacttgttgctcaaggttttactcaagttgagggtttggattttgatgaaacttttgctcctgttgctagaattgaggcaattagacttttgttggcttttgctgcttcaaaaggtttttaattgtatcaaatggatgtaaaaagtacttttctaaatggttttatacaagaggaagtttatatcaaacaaccactaggttttaaaaatcctgattttcccaaccatgtttttaaattgtctaaagctttgtatggtttgaaacaagctcctagggcatggtatgataggcttaagaactttttgcttgcgaaaggttttataatgggaaaggttgacaaaacgctttttgttcttaagcatggtgataatcaacttttcgttcagatttatgtggatgatattatctttggttgttcgactcacgctttggttgtagattttgctgagactatgcgcagggaatttgagatgagcatgatgggtgagttatcgtactttttgggattgcaaattaagcaaacacctcaaggtacttttgtgcatcaaacgaagtatacgaaggatcttttgagacggttcaagatggagaattgcaagccaatttcaacaccaattggttctacagctgtgctggatcctgatgaagatggtgaagctgttgatcaaaaggaatatagaagtatgattggatctttattgtatctaactgcttctaggccagacatacaatttgctgtgtgtttgtgtgcgcgctttcaagcttctcctcgtgcttcacatcgtcaagcggtcaagcgaataatgaggtatttgaatcatacacttgagtttggaatttggtattctacttcatcttctatatgtttaagtggatattccgatgctgattttggaggttgtagaattgataggaaaagtactagtggaacatgtcattttcttggtacatcattgattgcatggtcttctaggaaacaatctagtattgctcaatcgactgctgaatctgaatatgttgctgctgctagttgttgttcacagattctttggcttttatctactttgaaagattatggtcttacttttgagaaaatacctctcttttgtgataatactagtgctatcaatattgctaagaatcctgttcaacactcacgcacaaagcacattgatattcgttttcactttttgagggatcatgttgagaaaggagatgttgagttgcagtttttggacaccaagttgcaaattgctgatattttcactaaacctttggattctaatcgctttgcttttcttcgtggtgaattgggtgtaattcatccttttggcatggtttgagggggagtttgtacctcgtggttttatcaagcaataatatgacaatgaaaaaattgataaaagagagctttgtttatgcatatggtattttcttgtgcatgctagcaatattttgaaggtgtatttgtctctagcatagcttgtatgtattctagtcttttcatgagatttagattttgcttttaagggagatgatgcatgacacttaaattctatacttgaattaagaaaatatgcaatgttgatgctagcatatggtttgatttataaatgctctatacatatgctttattgacttgttattcctcaaatacctttatttgctcattgtgaaaaagagaataaaaatataaaaaaatgaataccgaatccttggaaacagtcttgacgacaaggacgtattcgatgtgagcaaaataatgggtgccgaatccctggaaacagtcttgacgacagggacgtacccggaataaaagagaaaaatatgagcaaaaaggctcaagaaaagaaaaagttcaaaaaattctctggttattttgtgctaaaggttatttgagaaagagtgataaatgcaataggtatatgtgtttagtgtttcttcttcaacctatgtgcttgttaagatgttgcattataaatcgtatgaaatcatgaattttgattgttgattcaagcttcattgtaaaatctttggttcatggttatactttaatgcatgcttgttctgttatagatgggttcattttctttttattgcaacacatgacttgatatgctatatgtatgctaagctcttgaacattaatgaacataattcctatgcttgatgaaatcattgtcaaaagggggagacataatgtgaaaatttttggatttttggagaagcaaagtgaatttttgagaagagcatgtttttggttcaattgggaatttctttcttttaaaaagggagagaagttttcttttggatttttgagcacgatgtgtacatttgtacgaagtgtgctttttaccaccaaataccaaaacatttttatggatttgccaatgtgttcatcaagggggagattgtaaaatcaatggtgttttttattattattctgtgatgaacaattgggcattggaaattattggttttgttatttggaatttatttattcacgaagtggttttggagatgattggatttcacaggtgaatatacagatactgctgtgattttatgtagaccggtcagaccgggctctggtagccggtcagaccggcgtgtaatgcgccgtcagaccggcgcagctgcggtctgaccggccgacactgtgtcggtttcggtttcgggttgtttatttggatatccgagtttattccatgattatgacttctagatggatactatacgcatgtaatactattgtttactgctaatgagtcaagttggagatagcttggtctcggaatatggtttctttgtttgtttcatgtgtaggtgactcgatgtctcgggagagtatttgcggtgatggaccgggagtcggcttggggataagacgacgtccgtggtggtcagagatcatgcgggatacttaggctagagttgatgcacgtggttgatggagattccatatggcatacgatggaggaattgtgtgcgtatgggatgcggagtcgaatttggaaagagtccaaatttggtacgattggttatgtaaagtttctttcttgtactagtgggtttcctaaggtgtttaggactcctaatatgagtttggttcatggctttaggctgcctacctcatgtataaatagagggggagcgtgaggcttcccggtatcgctttagagagcaattgagttaagttttgagttagggtttcgagtttagtcgaaatttttgtaaggagtgttgttggtgcactttgtaaacacagagagaagtaataaagtcgtcatctactttaagagttcttcgatttgtgtttcaccgggtttcggcggtttaaccgccgactcatcggcggtccgaccggcggcaaggcggcggtcagaccggcgggagcaaggcggttggaccggcggccgcagcaggcgcgacaggcgacttcggcggtcaaaccggtaaatctataccggtcagaccggcgacattcgagcggtcagaccggcagatcaatctcggtcagaccgacttccatcgatttcgagggtaacttttatttccgctaaaatttcttggtttttgggtataccaaccattcaccccccctctggttggcttagttcttgtgattcgatccaacatggataaggagtgtgtgttgggttgatgaatgatgaggagcgctgtgctcattaagtatcttgtctcctccagacaggatgccatgatgtaggtttgtgtgtattcatgtagcttgagtgattttcaaaggaaattgcaatctcattgtaatttgagtatgctaatggccaagaattgtcttaaaaagagggaagcaatggagtttgtgtatttttgaatggtgtgttctgcacttgtcacaaacagtgcatatacctctatagataccaaatattctagaaataattaaacacaacacttgcacacccatactcagttaatcttttaggtaaaataggctgtccaataagcaactctctccaaagatgtaccccaacaacagttctggcactcagtaccacaatgcaacaacttggctagtgataggtttcttgcttttaggattaaaagcgaaggccaacccaaaattagctatcgtaagttccccatcttcattattcaataatccctccaatttatattataagtcattttgactttttccaaataaaatttgatcatgattgtaaaaattgcagtgccaattttgtaaaagaaaatacatgtccatttttttagtaagtgatcttaaaaaagtgaaatcaaagattgcaaacaattttataccgtctatgagatctttcaattccatgctaagagcgacaagctcaatacaagtgaaaattaatcctatcaattgattttacgtttgctcaattttggaacttataaatatcaagacttcaccacagtttttttaagtagtcaactaggagaatccaagcaagctctgaaccatatgtaaccaatttcaaatcattagcttaaatatggttctatcgaagtataaccattgacaattttccgagaatgaacctttcttgttttagtgccatgtttgatatcaacaatgttcattattcgagaaggcattctatgttagacattaaggatctgtttgaaacacaagattgagaaagtgaaaatagaaaaagacatgattttgataggatgacaagtgtaaaaacataggattgcaaaaacaggaaaaacatgaatgaccgttacaatagaccataggaaaaagcaaaaacaattagaggagagataattaaagactcaaattaaagtttccatgaggatgaacctcactctagcttttttccaaaacttatgtggctccaagcatcaaataggaaaaatttcctataggattcaaatttgataaatttctatgttcttcctagaaatcaaggggctctatagctttaccctaggttgattcatgagccccaacataggctgcatattctatgttgagtcctattgaggttggattattatgaaattttgtatttcaaagtcaatcatttctaatgtgaataggtatctgatctttcaattggttcgatttgttgacatgaagatattcacattttgaggcttccgatcagacgatcatcacttgtaatcgctacaccccgcacttctcatcgttattgaccactctctcataattgacctcactaggaaggttatgtcctataaacattcaaagaaattcacaagaacaaggaaaagtgaaatctgaattgcagatgaacgattagcacttgaaattggggttgcacaaaccgaccttgcggcaaaactgcatagtgacagaacaatctaagcaaaacctaatccctaaatacgatgatggttgtctagcagtctgaggtcgtccataacaaaggctaactaaacatgactcaattagaacacccaagggctaaactatatttggaccgaatgaggtatgttagttgtttcgcagatttcgagaagctcaggtggaattttgacgtgagactataaccatctaaaagtagagttaaagacctatccaatctggagataatattggcaaggggatgatcataagaaaaggtgcagacttgctagatgggatattatttgccaatccaaatatcagggtggtttgggggttcataatctggagatacaaaataaatgttttttgagtaaatggttgcttaagttaataaatgagcaaggggtttggcaggacttattgaagagaaaatatctttataatcagtctataacccaagttgataggaaatagggtgattcccatttttggtcaggtctcatgaaagtcaagagtattttcttgaatatgggttctttgattgtgaataatggggaacaaacaagattatgggaagataaatggttaggtaatgtggcttttaaagataagtatccatcattatatgctattgttagaaggaagaattcttctgattgtttttcatggaactttaatcagaatggacggttctctgtaaggtcaatgtatctagttttgattaacaatggctatattgaaagggataagataatttggaagcttaagatgctgcttaagattaagatttttatgtggtacttgcttaaaggggtggtgttaactaaggataatttagcaagatggatttggaatggtagcttaagatgttgtttctgtatgaaaaatgagtcaacacaacatcttttatggattatcattatgcaaagtttttatggagagctgcacagttctctttttgtttatacctccctattagtatatctcatatttttgatgggtgactgttgggggtggacaagaaaaggagtaaacttatattggtgggagcttctgcaatatgttgggctctgtggttgagtaggaatgatatggtttgacaaatcaccatctatttcttatatgtaggtaattttcagggcaacatattagctccggttttgggcacaactacaaaggtgtgatgaatacaaaggtgtgatgaagacggtgagtttttaaaagttgtatgtcgtaagcttgagatgacggttatgcagctttttgccaattatggatggagattcacaaatatacttcaataatgtgttctcctgatcttgtattggttaaatttacctttgtgtggtcatttcattctatcatttttgaactacactcgttttagagtgctagattgtaataatgggttgtagctctttttgagcaaaggccaggatgtttattccattatctaaaaaaagacctatccaataattatttatgggcctaacaaatgcttctggattagcagctaggtccattttaatttgatgctgccaggagggtcgaattcgagtccgaaacatgtaaaatactatctcttgccttctagcaccttagtaatgtagtgacatggaaaaatactttggggggggaggggggggagaacttcagatgttcctaatcaacttcattgatcattcattgtctccatgtgtatgctcacctttgcttgataaatgctaacacttctgaaagggaagatacataaaattcatggtgcatcattctatgtccaaacatatagaaacaaaacccaatataaaacacatgcacattttatattatcgtgttgatgtggaacatgggaatggtcatatctaagccggtgatgttctcatcaattcaattctaggaactgtgcctatgccctaggacaaattttactggctatatttgtgcttgagtccatcttcctcctttctgctgcccattattttccaatggtcggaatgagaagtactataatcttcactagaaccattcttcaacacgacgacatacacgagactggtatggccatgttcaatttagattattgagcacattattgtcaaggattatctaataggctatatgtatcaattaaatatttcaataaataaacttaacattaaaacaagtggtctaagcacaaagtataaggaaataaacataataaatggcttaaaacatatttttttttgaagtgtggagcagatgatccaattcaataatctggtgaatattgttaagttaatgtatttctaccttgggccccacataggacttaagagtttagagaagtggttagccaaaaggctactaaggattgattgtaaggaaaaaaaatcataaccgctcaagagcaccatatgaggaaacaatgtgttattgagatagccttttccaaaaagaagcatatataactgttaacgccaaaatttggtaagcccaaagtcttcatcggcctagagtcagtatcgtcttcagagtcttggaatcggccaatgggagttgtcaagtcgccagcagttgtgttcttgatggagtcggatcaattaaaggaagcttatctagaagagtccgagttcaaggaggatgcgacatggcagtttatctattaattaggcagtatttgttagttcccttttatctttaggaaggtgtgtttagtgtccgataaggactttatgttttccttttatctctaggaaagtttctttcttgtcctataagaactagtatttacccatgggtataaatatgtacacccagggttattgtaatcaatctctcgatcaatacaactactctcggcgcatcgccaccctctttaccgaggtttttatttatcatctgacggaacttggcacctgacgcggggctgtatcggctttcgatatccggcgaaggggtaactcctacgttccgccagccctggtgaatttatcggctacgttggtgttgttcaaggctgcatcgcttcgatctcttggatctctctggtttggttgatatatttgcctacctgatatctcaattctatctctaattgcattgtgtttagagacgtatcggtttagttgggactgtctcggttaggtccgatcttctgtcttagccgatatatctctacaatcacaatgttgttgtaaatagatttgttatatccatcacattagacagatctatcggctcatcgagtattagattatcatatacaatctcgtgctgcatcggttaagttcgacctactagattgttgttgataatataaatcttgttaagccgataggttcatgctagtgttttatcggggtgctagccgataagttatctggacgttgcatcggcttataaggattacatacaagttgggtttagccgatcgtaacaaaggtttcactgtttaatctaatcttgtggattttatgacatcggacctccagccgatatatactttaaccttcggatcaatgcttatctgtcatatcattattagccgattggtttctattggattatattattgttatattttattatcatcagtcgattgtcttcatatcattatctacattgaacatatagcctattgctcaaaaccctatcgacattgactggaatcggcatcggctattatcggctatcggctggaactactctatcggcttatcagccaatcggctcattgatctactgtttacatatcttgtcagttgaaggatcaaactgactggcacgcccgcacctcactaagatttggacctgcacaggagctaagcagatctcccaggccagtgtgtgtttttcgcgttaacaataacacaaaagcttcaagcattacctcgtggattcaaaaccttagaatactttagggtaaaaactgaagcggtttccacaaaattgtgaaatatttcttgttgggcgtaagaaccaccaacattagggtaataaattctttaattctatcagattaattgtccatggatttcgagggttggtacctcttataattaatattcacagctcaaggaggggaaacaattcattgcagtacaaatcataagttgatttgtacatttattatgtagattttatatctatttccattaatgagtacctcttataactctttctatataatggagttccatatagagatacgatgctcctacatttcaagatgtctaagcataacctaggattatctatccatgttatctatatcatgtttgctgctcaccaaatcctgggtggaggatttcatctgaccaaccaagatgtgaatatggtaggcctatgtttattttactttttagtattttccattatgaactttgatcgttttgttttgacatgagcataattgcaaactcatgcccttttgatgatagaggaagtcaaattggaaagtgcaatttgtttcgatgtatcgatacatatatggcttccttttctaaatcttctactcctaccatatgtggtttatgatgaaatttaaccaagtgctaataagagtagtttgcttacttcatgctataaatgccttttcatcttcagacaaggtttggaaaatctttgcaatcaaaagttggtgatgccacaaagtcatatgtaagtatatatgcacaaccattgtgttttattttatccttatagaaattattttccatgattttttctctctatttcttttgcttgtttctacagatggccatgcatcagacatatgaggggacctactttgggtttgttgctacattggatgtgtatggatttgagattaattatagccaaagaatcatatcatcagtatggattgtcaacagaggtcccaatgacaacctagaagagaatgcaattaggattggatggcaggtaagcagttctccttgaaaaagtcagtaatcttatgtttatgttttgttcgttttcagcattaactatatcacattttttctaggtttttcctgaattgtacggtgactcacacacccacttcttcacttattggacggtatgattttctctacaactcaaaaattatattgcttataaaacatgtgtggccattgacctttttttttttttttgcatttgaaatagagggactcataccgaactacagggtgctacaacatgaggtgtccaggttttcaactcacacttggatcaaaaataactcctggtgatgtcataagcccagtatccgatgttgatggagcgcgacaaaatattacaattaaagtgtctagggtaattaactactccctccggttttattttaattgacgttttggacaatgacacggtctacaagatacatgtttgatcttatttttctattataatatatataataaataaatgcatgtttatttttattatagtactttaaaagaaaaatttatatatattgttctagttcctttaaactaaatatttttaaagttatcgatggtcaaagttataaaagtttgacctcaaccttgtccaaaacgtcaattaatatggaaccagagggagtaaatatatatactacaaagcataacttccatttatatactccccccttccctaaatatttgacgccgttgacttttttaaatatgtttgaccgttcgtcttattcaaaaacttttgtgaaatatgtaatactatatgtatatataaaagtatatttaacaataaatcaaatgataggaaaagaattaataattacttaaattttttgaataagacgaacggtcaaacatttttaaaaaagtcaacggcgtcaaacattttgggatggagggagtatattgttaggcatatgtaaatgctatgatcagtgctagctagtgaactaaaaaaacatatataaactcaatttacttttttttaaaaaaataatgacaggaaaagtctactggggattggtggatatactatggcttcaacagtgctccaacagttgtgggttatttcccagctaatctatttaccaacttatctgaaaaggcaactagcattttatttggtgggagtgttttagcagtagaaggtgcttcaacccctccaatgggcagtggattattgccatcgatcctgtctgacaaggctgcatcaattgaggatattttattagtcgatgaagatggcaaaatcgcaccatttgatgtgaagacgatcaaagacgagacctcagacctttgttatgccatgacacctatttttggtgaaagcacttcaaggtgcttatatggaggccctggaggttgcgtcgtcggttaggcagatttggcttcaactaatttttggcctctgttatgtatacatgttctttttcattgttgtcaatggaaccagggagttccatatatggagaaagataatttgaggccgcaccattggttgtgaattttaaagcataatactaattttcatattgtctgatcataatggagtatatttttgcatgtctaattcggtcgtttacattcctcacttattttaaaccaagtagtttacttgtagaaaaaaaaatcaatactagtcagcatgcacgtggatcctacgttgacatatgagaatatatcaacgttgacagttgttaagtaccgatttcgaccgtcaattatcttaacaaataaatatatagaactagcatttttacacgcatatttgtttcaaataatttcccttggagaatattataaatacatggattggctaccaaatgaaggagaatgagccaacatgcaaagaaacatatttccggctaatcacaagagtgcacacagattgaagggcccatttagcacatacttgacaaggaggaagagcatgggagacaggggatcgccctgctagagcccccctacagtgtaggaaatggtggctcggtaccccgttgaccagcacctgggaagaggagcaacggagaatcagggagatccaatcacgccatcgactgctgaacacaagataggtaagcaccttgagcaggaacagccaactaacttgtcaaaggccttcgcaatgtccactttgaggagcagatggggcgtgcgcctagcatggagtgccttggccgcaagctggacatagcaaaagttgttatggagtgaacggcctttgacataagcacttcgattaaccgccaccagctcgttgaggtggggagtgaggcaggacgctaggaccttagaaaacagcttgccaaaactgaagatgaggtttattgggtggaaatcgttaacttgaacaacctcatttttcttaggcaagagagagatgagggcatcgttgagggaggcgagaccatggttgttcgccagaaagagggtgttaagggcaaccagtatttccacttgatcattggccagcaagatttgtagaaatggcttgtgaaaccattatagtcaggcgccttatctaaaagtagctgcttgattaccgcccacacctcatcctcagagaagatgttgtctaggccagcaaagtctaccgaatagagaccaagagagtgggggtcaagacaaaggtctcgctcgatgaacgtccccatgacactgcaaaagtgagtagaggcaagcgcgctggcgcgtgatgcagttcctctgccgcctggccttagtgtgaagatggaaaaacttggtgctgccgttaccctccttgagccaaacaagacgcgaatgctggtgcgcaatggtatgctcaactgaagcaaggtcaaggcacttcaacttaaggtcatgccataaccaggactccaatggagagatgggcgagactcttacatgacctcgagccgaaatataagctcttctccattagcaatcgaagatagacattgcccacgtgctggtagctctagctctgcaagcacttagctgtgttagagaaaccccaagcgagtgctgccattggggaagatgggccggtagttgccactcgtcctacacgacttggaggaagccgtcgaacttaggctagatcgcttcaaagtgaaagcgatgtgctttcgacgagaatcgcaagagtaaaggagtagagcacagtgatcagagataatggaggaggccgcttgaaggagacaagatgggaaaaactcctcgcaatccgtggaaaagaagacatgatcaagtttgacgatcgtgggggaatcgcgctctatgcaccaagtgaagcgacggccatggagtggcaattctcggaggtccagctcgtcaatcagccgtgaagcggcccatcatgctacaattgaggttcatgttgttcttgtcctgggcctcaagaattagattgaaatcactcgcgacaactcatagccccatacgagaagagcacaacgaccgaggctcgtcaagaaaccaaagtttgtccatctccccctgtggaccatagattacaaagagccaccagggggtaccgtcagagtggtgatgaaccaacgctgtttgaagaagtcagcatggtgaatgttggagatagactagacggcggtccgccaagcaagcaacatacgcccactccaaccgatcgcatgcaaaaatgaatggtgaaagtccaggcctagcatttccaaaataattcagggcgagattacatccattttggtctcctctagatagagtagcaagacacattcatcacggacaacaacttggtgggcacgtgagttcagaccctgcatgttccacaccaacacattctcattgcatgatcccatagaggaggagccatacacagagagagagagagggggggaggtaattagtcgtagctagagaagagcgaatacatggcaatgacgtgatcctgagagaatagtgcgttgtaagctgcaaatgcctcggccgagacaagaccctccttcagcactagccctagcttgcgtatcaggttgcgctacacacacgagaccgtgttactgggtccagcgagcatgagcttggccgccatcctcttgttgcacttctgcgctacccccacgactgtgacaacaagtgctataggcgtgggtggtgggagcagcaccgaaggcaggggcttggagaagctggcgaggaaggcacgctacgcggtgttcgccacgatcgagggtgggagcaaatgtgtcatcgaccggccgtcaaagtcgaggactaccacggacacgtcgaacaggacatgtcacaacctgaatttccgttttaggatttataaattatttaataaattattaatagaatttatattaaatgttcattaatttacaagtgaagttaaatgtgggaaataaaatttcctaaatgtaaagcatggttggatttaatttttattaaattctccatgattaattatactctctgaaattttctcggaattttcggagctcaattcctaatgttaataatacaaagaacagtttagcaattatttaaataataaattaatcattaaatgatctggatattattatattaaatactttgagtgtccaagtatgttcaacatttttgttggaattatttgagtattggaagtatttttaacaattgaaagatcatctcattggttaatttatttggaaaagtaaataaaagtcctcctcatcagcttgggccgaatccagcccattccctcctttcccctctcccttcctctcagcccagacaaagtctgtttaacctccctggcgctacagtactccatcttcctcctccagccgactgtctcccgtgccgtgcacagtaccgccgattcccttccaaaatccggccacctcgttgctcctttttccaaattagttgcgggaatggaattctctcaatctcctcttccttttccccaagaaatacccaaatgtttctatggaaatcctttccaatttcgcggttcaacctttcctttttccggcgaagatctaaactttcccgagtttttcccgtcgttgtgggctcgataccggcctcccatggctatataaaggaccccctagtcgtcctctacctatcccctcaagtcccgtccgccgtcgtcgccggaatcgctctccccgcgctctccctctctctccacctccggccgccgctccagccgccattcgccgtcgccccggccgtcgccctcctgtgacgccacctccctcggcttcacagtgaagagctctaccccggccacccgttcttttgcgccgaaccccgccggaagtcgccgtcctcgtgaaggccgaaccgttgccatgttttgatctccggcgaggccctgctgctcatcccgtcgtcgccttcggtcgccgtcgcctcctttgggttcgcagctgcgaggtgatggccgtccacccctccgttgtcgccgcacatcgccggaaagtcgtcgccttcgaggacagtacctcgccacccttcgaagctcgtcgccggccatctttcgttgccattcgtcgtcgcgtaagtggtggtaagggtcactttgatcccctcttcctcccagtgccctccgtttgcattattgtaccgttgttcgccggcaaccgccgctcccatgccgttcgccagtgtaggtttttccctagggtcttaatccaatataatctaatccgtggtttgtctagcgttgtcgtctccatgtgttgctatcggaacgttgtcatcatccctccctctccgatcgttttggatcggtgagacgtctatcattgtctcattggtttagatttcaacccatcggccgcgcttgccaagccgcttcgtcgcaaccgcagccgtgcccgttgcgttgttgttcgccgcgctgctgccctagcctgtgcaccgtcgctaccggttgtgccgttgttgcttgccgtcgccgctgcgctagtcgcctagtcgccgttgtgccctccctgccacagtcgtgttgctcctgctgtgcgttaccgcttgaccgctagctgttgtttggccgttgctcgtgtgtgccaagttgttgccgtcccgctactgcaaccactgagccactggtcgccgtgctgtgattgtgtcgtgccgtgccgttgctgctatagtgtgtcacggccgtgcgtcacttaaatctagccgccgctatcccgcgttgtcgttgttgtggtttgttcgatgccgttgcccggtagccgagttgcaaagcctaaggtgcatccctaaattcctaccggcctatcgtttgccataccggggctttaccatgaatcgtgtctagcccaccggtttagtcgcagccgttgttgagttgttcgctcgttcgttcgtccgtctggagtcgtcctttagtttagagccgttcagagccgccagtttcgttcgccggtttcggttgatcatttgggtgatcccgtgtcacgtagaattgactcgttgagtcggtatctcgtgaggttcgcttgcaagattaatcttagccatccaaaatcaatataaatcatttcctctcttttcagtggcatattatttctttttaatatatgtcatctaccaaatatagtctaatctatttccggaggttgctttaatcttttatctcagttataaatcttttgtaaattgtttaatcaatttggaatagtcttttctttaataggcattaattggaattaatcttgtaaaattcataattaattcatatgaagtcagaatgaggccgttcaagtctcataattcatctaaaattatgacctacatgtttgtttactttatatgtattgtttatttggtttttattagtcttttttctcgttttacgtgttagcttggcgtttccgtcgtttcgaaggatcgtaagtgcatcggaagtattcaagaagattaattgaagacccgttattgcaaggcaagtcacacagatcccaaacacaattcctttgagcatgttgattctatatttaaattctctatttatttcaactgtgtatttatttttgaatgtcaccgggtggtgtgaacctattcctttgttatggccagtttgcattgattaccctatttcttgattatctcgggttataatttgactagttggatttatatattagttcaactagatgtattagatataattgcttagccatgcttagaaacattagcatacaattgggataactaatgtttcactactacttaatgatggacatgataatggtagctcacgatggtcaatcgtgattggttaattaattaatgtgccaactaaaacttgataatggtgggttgtgagcacatggttttgatggtcgtgctcataacaattaaggaccggttcacgagtttcggttgtgaaacattaaccgtgtcaaccacaagccagcgtgggcaacggctttacctattgtatagcatggttcattgcggggcaccagactgagaagtggcggagataagtccacgggggtcgctggggagtccatgccttgtttataagggggtgattatgatccaggaatggtgcgctgtggtggattgtgttgtgcgtggggtactgtcacagctcctttccgaggtaccgtggtggtattgaggcacatggtgacatgttgtggggctgtgtcttgtgggtacagtggtacacctctggccagagtaaaactattcgaatagccgtgcccgcggttatgggcgggtctaacaatgtctttcgtgattagtctcacacttcttaccataataaatgatgctataactggtaataatttgattagctcctggtttggaatggtacattcctggtttggagatagatctgtacagccgggtatggttgttcaggatggttgggcttgtgcagcatggatgtgctgttcagtgattgattaatattgatgattaattactctactgttttactactcttaaatgtttgctaaatgctgcttttgcaaatgagccatatattatgccatcctttggtatccttgtgcacttgcatatttgctgtgtggcttgctgagtatgtcatatgctcaccttgcaataatcaatcaaacctcagttgaagacaagttacgaaggagaagacgtttggcttataccccagttgagctgcctgtgggagtggagccggagcttcgtgtcacgcccagaaattctcaaaccagaatttctaagctgaatgtgcattaaatccctgtccaggaccagccagggtacacaaacgataattgttgacatccagatccacgtcttacaaaaatagaaaagattgcaaatgcagcggaaaagataaaagcgagctaaaccgggaagcttgacttcagcagcgagcggctccactccacaggcaatccttgacggcagcgacgaaaccaactttgacaaaacagctccaactaggaagatcttcagctctggtgtgggggaaaagagagcaagactgagtactacccactgtactcagcaagtcataccggaagaggaggtatgatgcaagatataaccaaaggaagctaggggttcttttgcataaagctagcatttaaaaacagtagttgaaagcagtaaaacagctgtagtaattaatcaatattaaccaaacactgtccaacgctacaccacgttgcaacaggcccaaccaaccacctgaactacaccagttcattaagctaaactaggggtgagactaatcacggtgaatctggttgatcgcccataaccgcgggcacggctattcgaatagttttactctggccagaggtgtacaactgtacccacaagacacgattccacacatgtcgccatgccccgaagtatcaccatgatactgcaaagggggaaatcgtgacaagaccctccacataaccctcccctaaccatccacaccacgctaaggtttcacccccacccctcacaaggcagtgggcggtcccctcttgcgccgcggtgaatccggcagctggacaaccggacaccccggccgacccaactccatcacgcccaccctcgccaccggtgcctaggaaagggtcgagctatacttcagatcaagcagttacccactcccgcttgtggtaagcacggtaagtctcccagggtttcccgtgaaccggtccttaattgccatgggtgcgaccagcaaaaccatgcacccacagcccaccattcaatgtattttaattaactaacaccattgcggtggcaccaatctaaagctatgccaatagacaaagtctatgtaaaaatgtgatccccattagtgtactagttgaactaagcatggctaagcatttcctaaaccaacatctaatcattttgatacccaggttatcaatggcatatggtaaacaataaatggctgagtaataggacccatccctcattacattataaaagaatgcaacatttaatagaaatgcgggatattggtaaattgggtacaatatgatcaaacgtattgcatgacttgccttgctctcgcactgatgagacctcagcaaagtcttcgagaaaccgcggatcgacgaaacggccgaaacctacgcgacaaacaaagcacacaagcaaaacatgctataagactacagaaacaggaaacaaaaccatttttaatggattctttgcatttttcttgatttactgagacttgaatggacttaaacggagctcggatgaattacttatgaattttagaagataaactgtgtttttactaataaagaaaagtccttaaatcaatttattgcgcaataaagcccagggctgacgtcagcgaagggggggggcggcgccgacaggcggggcccacgggtcagcggttcaagagaggggagagagaggcgccggcaagcgggcctactgggcagcggctcaaaggggaggggtggtccaccggctggtgggccccaccgggcagcggcacagggcgggagaggggcgtggctgctggcttggcacggctcaagccggccggccatggcgaggcgacgacggcgcacgaccgccggcggtgcggggagacggcggcggacggcgcgaaaggcggcggcggacggccggagcggcggcacggccaaaggcggcggcgcacgcgtgaaggggagaaaagggagggggagggaggcatcggccgggctcagctcggcctcaaggccgaccggggcgaggcggcggcgaggcacgaccaccgacggcggggaccggcggcgcgggaagcggcggcgacggccgaaaggtggcggcgcatggccgaagcgcggcgatgcacgtgcggagggcggcggcaagcggtggcgctagcggcgagcggcgtgggctcgttaggagacacgggaggggacggcaaatggggaaaacgagagagggagctcgggagagtgatttaatgggcgaaggaggggaggacgtggccgggaaccctcccgatttagccggcgacgtggggaggagagagagaaagaggggtgggattcgaaatcgaatcccgccctctcgagcgcgcgcacgggccgggagatgcgggggaagaggcggcgacgtggggaggacgcgggagcggcgcggcgtgggcgcgggaagagcggaggaggcggcggcgtggcggattcggcggcggttgccgtcggaggcgggtggctggaggaaggggacgacctgacaggtgggccccacctgtcagcgtcccggagagagggggaaagggaacgggccggcccacaaggggaggccgagcgcgggcgacgggtggactgggccgacggcccaagaagaggaaaaaggaggaaaaaggaaaaagaaaaagaagaaaggattttcctgggattaaaattgcactttggtgatttttaattggttaaaattatttccaaggctctgaaaattccactaaaaatcttgttaatgcattggagcatggggaactcaagaaaaattccaccatgccaattccaattattaattgcatttattagttagggaattagctctaggttaattaagataatttcttcgggcaatttatttaacaaatttttaaagcaaggagagggggaaacttcagggcgtgacaaacctaccccccttaaacggaatctcgaccccgagattcggaagagctggcgaagaggtgcgggtgggtggccttcaactcatcttctctttcccaagtggcctcttcctctgagtggtggctccactgaaccttgcagaatcttattactttgtttctggtccttctctcgctggtttcgaggatacgaatcggcttctccacatacgtcagatcttcctgaatttcgatgtgatccggacttgcctgttcctcaggaactctcaaacatttcttcaactgagagacgtggaacacgttgtggatgccaagcatgttggagggaagctcgagctggtaagcaacttcacctctacgttccaagatcctgtatggtcccacaaagcgtggtgccaactttcctttggtttggaagcgatgtactcccctgagcggagtgacacggagatacacataatcccctgtttcgaaagcgagctctcttcggcggttgtctgcatagcttttctgccgagactgcgcgattctcaatctttccctaacagctctgactttctcttctgcctcatttaaaacttctgtaccaaacaactggcgttcccctgtctgatcccagaagagcggagtacgacaccttcgtccatacagtgcttcaaacggtgccatctgcagactagcttggtaactgttgttgtaagagaactcagcatacggcaagcttttgtcccatgctccaccaaagtcaagcgcacaggctctcaacatatcctctagaatttgattgactcgctcggtctggccatctgtttgtggatggtaagcagtgctgaaattcaaccgggttcccaattcttcttgtaatttctgccagaactttgaggtgaattggctccctcgatcagacactatcttcttaggtacaccatgtaaacacataattcttgccagatagagttctgctaatttcttccctgagtaggtagtgtgcaccggaatgaagtgagccactttggtgagtcggtcaacgactacccaaatagaatcatgccccgatgacgtcctgggcaaaccggtgatgaaatccattccgatttcttcccacttccattctggaatctgaagtggctgtagcaaacctgctggcctttggtgttctgcctttactcgttgacagacgtcacagagtgctacgaattcagctatttcccttctcatgctgacccaccagaacttttctttgaggtcttggtacattttggtactgccgggatgaatggaatattgagtttgatgagcctcggttagtatcaggtcttttaattccttgttttcgggtacacacaatctttctcccatccagattgttccttgttcatcctcaacaaaacctcgggcttttccaactctcatgttctttttgagctctgctatttcaggatcacttgcttgagctatgcgaacctgctccaccagtgtgggctgtgcctctagggcagccacgaatccgtgctcaactatcccaaggttcagatgttccaaatcacgttgaacctcacagcatagttgctctacccatgcaacattgcagtagctcttcctgctcaaggcatctgcaaccacattagccttgccgggatgataatgtattcccatatcataatccttgatcagctccaaccatcttcgctgtctgagattcaaatcaggttgagtgaagatgtactttagacttttgtgatctgtatatacctcacaacggttaccgatgagatagtgccgccaaatctttaaagcatgaacaactgcggccaattccagatcatgcgtcgggtagttgccttcatgaggacgcaactgccgtgaagcataagaaaccagtttgccatcctgcatcaacacacatcctaccccctggcgagatgcatcacaatagacctggaaatctttcgtctgatcaggcagggttaagactggtgcagacaccaaccgtcgtttgagttcttcaaaactcctattgcattcagcagaccagataaacttttcttccttcttcaatagctgtgtcattggcttagcaattttagagaagttctcaatgaaccggcggtaatagcccgcaagtcctaagaaactccgaacctgagtgactgtccttggtggggtccactcggtaactgactccacatttgctggatccacggctactccttgagcattcacgatgtgaccgagaaactgaacttccttaagccagaagtcgcacttgctgaacttggcatatagctggtgctcttttaacttttcaagtaccagccgaagatgctgctcatgttcttcctcggacttggagtagataagtatgtcatcgatgaaaaccacgacaaacttgtctagaaattccataaacaccttgttcatcaaattcatgaagaaggcaggtgcattagtgagtccgaaagacataactgtgcattcgaacgacccgtaccgagtgatgaatgctgtctttggaatatcctcttcgcggatcctcaactggtgatagcctgatcgcaggtctatcttagagaacacagtagctcctttcaactgatcaaacagatcatcaatccttggcaaaggatacttgttcttgatggtgacctcattgagtgcgcggtagtcaacgcacatcctcttggttttgtctttcttctccacaaagataaccggagcaccccaaggcgacgtgctcgggcggatgtatcccttctgtaactgttcatcgacttgcttcttgacttccgccaactcgctggctcccattctgtaaggcctcttgtggatcggtgcagttccaggtaccaagtcaatccggaactcgatatccctttttggtggcattgttgtcagatcgtccggaaaaacctctggatactctctgactatgggaatatcctccagcttcttagtggttttctccactgctacctcttgttcttcaccagcagcctggtttaaactgatccttggcttctgcagcactggagactggaaggttaccacctctccttttgcattggtcaacttgatggtgcggctggcgcaatcaatcactcctctatgccttgtcaaccaatccattccaagtatgacatctaggtccttggattcgagaagaatgaggttggctggaaaaatcaacccttgaatttcaactgtcacagctgggcagtagtgagttgtggtcatgccacctccaggagtatgaactcgcattggtatcttaagcttcactaaagataacccatgtgcaccagcaaaacgcttagaaatgaaggaatgagttgcaccagaatcaaacaatattactgccggtgtcgagttgacggggaatgtgcccaatataacctctggtgctgactgcgcctcctctgcagatgcatgattaacacgggcctgaacgaacttgggtccagcacgtcttggcttcgggcactttccaaccgtgtgtccgggttggttacaattgaagcagagttcgggtttttctcccaacctcttgggctgttctggcagagctggctgagctggctgatctgactgagctggaatcattaatagacttggagtcgggttgaggctgctgtgactgccactgttgttgttcttgttgaaattacccgggtggtagggacggtgctgtcggataatcatggtggaaggtccaccctgacgtcccatcgtgaaacgaggcttctgacacttcccctggggagtcctgaactgggctgccttcctcttacggttcattttgctacactgctcctcttgacggatggccttgtggacctgcttctcaaagtcctcataatctctagagatcaactggttagtcaattcatcatcaagaccagacaaaaacttctcctgcctctcggcatcggtacgcacgtcctcaggggcgtagcgcgcgaggcggttgaactcatgcaaatactctataactgttctggttccttgttgcagggagcggaactctctcttcttttgtgccacaattccctcgggaacctgtgctttattgaaactatgacgaaactctgtccaagtaacctctgccccagctggacgggtcaccatgtagttgtcccaccaaatagaagcgggaccttgtagctggtgtgtagcaaaagcaaccttctcctgctcgttgcattgcaaaagattcagcttcttctcaatggcatgaagccagtcataggcctcgattgggttggtggtgcttgagaaagtgggcggcttgacacgaaggaattctaacagtttggactgaggaggtggaggaccaaactgcaggttctgttgctgctgctgtgcttgctgctgcacctgttgcaacacctgatggtactgttgctgcatctgttgcatcatcattgtcatcatctgagtctgattgtccaacacctgagcaattgttgggttctcgggcggtggggacggactgttgtcagatgcaccgttggcacgtgctccattgatcggctcttcgctgccactggcgttgttcgagtcgcgtgaaccattccttatctccatctgaaggggataggtagaaatatgagaaaaggaagaaaaacagggggctcagaaactaatcttgcttatgaatttaagtgcaattatcttaatcttgattaaaacactgaaaaagaggcacgcaactcctaattgaggcagtcataccactgacacatgatatcgaccgccgactaacccacaagcaacaaacctaaacacgaaaactagcaagcaaacagactaagaaggcgataaagctaagggaggcgactctgaagctcggggcggcgcttgcaatcgagtaggactgacatctaaagtagacaagggataggaaccaattcatgctcaaatccaaattaaacgaagcaacaaatgactcaaacgaataactgaacatgatgatttttatgcatagaacatttttcatgaacccaaataaagacactaatgcaactaaacaataaattaatgcatagactagttgcatggaaaatgatgcgcataacattgcccccatcgaatatagacacgacctaatgcataacccccaataaattcccgactgactgtcgaataaactccaactaaaatttttctaaagccctagactgagctaatatttttttaaaaaaaaaaatccgatccgaatgaacgaccaagatttttcccgcaaaccaaagaggcaaaactccaaattttcccaaaacaattccaggagcaaaaaggcatatgcagatgaaaaaggggttcagagggctcttagggtttccagttggcttgtcctacggtcaaggtcggctctgataccaacttgtcacgcccagaaattctcaaaccagaatttctaagctgaatgtgcattaaatccctgtccaggaccagccagggtacacaaacgataattgttgacatccagatccacgtcttacaaaaatagaaaagattacaaatgcagcggaaaagataaaagcgagctaaaccgggaagcttgacttcagcagcgagcggctccactccacaggcaatccttgacggcagcgacgaaaccaactttgacaaaacagctccaactaggaagatcttcagctctggtgtgggggaaaagagagcaagactgagtactacccactgtactcagcaagtcataccggaagaggaggtatgatgcaggatataaccaaaggaagctaggggttcttttgcataaagctagcatttaaaaacagtagttgaaagcagtaaaacagctgtagtaattaatcaatattaaccaaacactgtccaacgctacaccacgttgcaacaggcccaaccaaccacctgaactacaccagttcattaagctaaactaggggtgagactaatcacggtgaatctggttgatcgcccataaccgcgggcacggctattcgaatagttttactctggccagaggtgtacaactgtacccacaagacacgattccacacatgtcgccatgccccgaagtatcaccatgatactgcaaagggggaaatcgtgacaagaccctccacataaccctcccctaactatccacaccacgctaaggtttcacccccacccctcaaaaggcagtgggcggtcccctcttgcgccgcggtgaatccggcagctggacaaccggacaccccggccgacccaactccatcacgcccaccctcgccaccggtgcctaggaaagggtcgagctatacttcagatcaagcagttacccactcccgcttgtggtaagcacggtaagtctcccagggtttcccgtgaaccggtccttaattgccatgggtgcgaccagcaaaaccatgcacccacagcccaccattcaatgtattttaattaactaacaccattgcggtggcaccaatctaaagctatgccaatagacaaagtctatgtaaaaatgtgatccccattagtgtactagttgaactaagcatggctaagcatttcctaaaccaacatctaatcattttgatacccaggttatcaatggcatatggtaaacaataaatggttgagtaataggacccatccctcattacattgtaaaagaatgcaacatttaatagaaatgcgggatattggtaaattgggtacaatatgatcaaaagtattgcatgactttccttgctctcgcactgatgagacctcagcaaagtcttcgagaaaccgcggatcgacgaaacggccgaaacctacgcgacaaacaaagcacacaagcaaaacatgctataagactacagaaacaggaaacaaaaccatttttaatggattctttgcatttttcttgatttactgagacttgaatggacttaaacggagctcggatgaattacttatgaattttagaagataaactgtgtttttactaataaagaaaagtccttaaatcaatttattgcgcaataaagcccagggctgacgtcagcgaagggggggggcggcgccgacaggcggggcccacgggtcagcggttcaagagaggggagagagaggcgccggcaagcgggcccactgggcagcggctcaaaggggaggggtggtccaccggctggtgggccccaccgggcagcggcacagggcgggagaggggcgtggctgctggcttggcacggctcaagccggccggccatggcgaggcgacgacggcgcacgaccgccggcggtgcggggagacggcggcggacggcgcgaaaggcggcggcggacggccggagcggcggcacggccaaaggcggcggcgcacgcgtgaaggggagaaaagggagggggagggaggcatcggccgggctcagctcggcctcaaggccgaccggggcgaggcggcggcgaggcacgaccaccgacggcggggaccggcggcgcgggaagcggcggcgacgggcaaaaggtggcggcgcatggccgaagcgcggcgatgcacgtgcggagggcggcggcaagcggtggcgctagcggcgagcggcgcgggctcgttaggagacacgggaggggacggcaaatggggaaaacgagagagggagctcgggagagtgatttaatgggcgagggaggggaggacgtggccgggaaccctcccgatttagccggcgacgtggggaggagagagagaaagaggggtgggattcgaaatcgaatcccgccctctcgagcgcgcgcgcgggccgggagatgcgggggaagaggcggcgacgtggggaggacgcgggagcggcgcggcgtgggcgcgggaagagcggaggaggcggcggcgtggcggattcggcggcggttgccgtcggaggcgggtggctggaggaaggggacgacctgacaggtgggccccacctgtcagcgttccggagagagggggaaagggaacgggccggcccacaaggggaggccgagcgcgggcgacgggtggactgggccgacggcccaagaagaggaaaaaggaaaaagaaaaagaagaaaggattttcctgggattaaaattgcactttggtgatttttaattggttaaaattatttccaaggctctgaaaattccactaaaaatcttgttaatgcattggagcatggggaactcaagaaaaattccaccatgccaattccaattattaattgcatttattagttagggaattagctctaggttaattaagataatttcttcgggcaatttatttaacaaatttttaaagcaaggagagggggaaacttcagggcgtgacacttcgctagaccgtaattccgctgcaattttcttttcttttgtaagtatgtaacgttattatattgatgaatctgtatattaaattgtcagtttgtgtacctcggctgattcctggacgaggatttaatgcacaaattagttcggaaattactagtgaattttcgggcgtgacaggacccgtcccccacaaccgaagatgaggggtcggccggcagagttcccggtggcaagggcaagaccggcggccatggtggtggagatggagcacgcccagagcccctgaaacccggactagaccgaggcgacgaaggagacatgccgattgctagagggcgtccacccgtcttcaaggcgccgtcagccaatgaggcagagagggagagagttgatgttgtctccatcatgggcaccgcgccattgtcgttggctggtgggtatggagaagcctgaggcgttgggggagccgcaccattgtcgttggctggcggtaaaaggaaagccagagcacgtcggggaggagagagactccggaggcacgaagccagtgatggagccgatgatgtcggttgaggaaaagccggtggcctgtcgcccgtcggagacgctgcaccaggtactgagatggtggccagcggtccgcccgtcacagaagccacactatgacgacggagaacagtagcctgacggcgtcatcggaaaggagagctagggtcgacgcacgacgacgaccagagtggctggcagagcgtcgatggcaccatacaccagaggaatcggaggtccgttgctcctcgctagcgtcacaccgtaggccgtcggaggagcacgcatcgtttgccgcggtaggggtgtgcattggagaggagagagctgccggcgccacgctgtcccggtgagccatcgtcatgtcccctgcagcccttggtccaccgccattgggcctgcacgaggcgccccaggcgagaccgcgcacagccgaggtagactgttcctttgcgatagcccaatatgcgagggtggcccaagtacaggggcggcccaacaggtggcccgaggagtgaagatggcccagagagcagagccaacccaaggagagagaacggcccatcagatggagatggccgagaagagccagcggctcagcaggtggaggcggcccaaggagaggtggaggctgagggagtggggaagctgcttctcgaagcccggtctcgactcacatgggatccggtgtggcactagacacaatggtcggtgccacatgtcggctcgccattgcctcctcatggggaagaccctggtcaaaagaaggaaatggaaaaacctcccatttttagcaccaggcaagccgccggcgagggcgaatctagagcacagagaagccgagtgcacacttaatttacacaaggcactcaggggttgtagctgttgggcatttgggcagttcgggctgcacgtaagcaatttggccttcatgagctgcctgcagcctgcaggctgctgggtagctgaagttggtacgagtattttttttctagagtgcacagaaggtggtgaaaattactaccttcgtttcaggttataagactttctagcattgtccatatttattgtttcaggttataagactttctagcattgtccatattgtccatatttatttatatagatgttaataaatctagacacataatacaatactagaaagtttaggaagtaggtgcctgctaatatgattcatcagtgatcagtgcataaaaacctataatgtttgtcaaattatatacacacaatagcgacctcgacaaactaatatttagtagtatatatagtataacaaatgatgtcctccatacatgccaacaactaggaggaggacaccaaagcatgcatatatactcaaaacacatcaaaatacaagtaatgaaacacagccacactgtacaaagccaaacagacaaagctcatcgttcgatccgatcatcacttgccgtctccggggacggcggcggccgtgtcagcggcggcgccgccacgttgctgggaggagacggcctggacgaggtggtgcacggccttgtcatagctaacgaaccccatgaaccagaagtcatgcgagtccaccgtcacgacgtgcacgtacttctccggcgggctctccttcatcgtcaccggctcggcggcggcgaccttggccaccgggatcatcaccttgtagtagctccacgccgtctgccccgagggcgccgcgaaggagagcggccggtcgctgcagaacgcgacgctccggtcggtcaggtacagcgtgccggcgacggggcccgtcgccgtcgagaggtagcaggcgaacgtcttcctcagccgctcgtcggcgccggcgccggcgaacgtctgcttgtagagcttgtcgaagccgccctcgctgagggccttcgctcccaggctcagcttccccatcgccgcgtccgacatcgacggcgccgtcttcactgcaaagaggagcgaaggaagaagaaggtgacacgtcagcaacctgttcgtgacacgtgtcgctggtcaaaggacacgtggcacacgtgatctgaagcagagaaggtaactctgctccggcaactagaagcatcagagtttgcatctaattttgcatttctgttgagtaccagtaattactccctccgttcataaaagatgaaagatatatttatttcaattttttttatcaccaagaaaaaaattaacctcatccccagtctaacaaaatagaaaaaaatctatatgcatacaagaattaaaataacagcttagtttagattaagaaataatttaacacaaagactacacaactataattatctcttttagaaaaactaaaaattgaaacattcttaacacttttggactttggacagatggtgtggttctatacagttactaatcctagttgatatctttcaataaaaatacatcaatattcaaacttgtttcctgaatcagactcaaaaatccaaactcttgatccaaaattaaaagcttgttactgccacgtgtgggcgtggctggtcaaatcacacgtgagcagaagctttggcgcaagaagcagagtaaaagtggtaatcctaatcaatttctcctcaaataaaagaacaccaaaattaaaactgtcttttgtaaatcagactcaaaacgggaaacattttaagcaaagatttgagagttttggatcacttacggttgaaccagatgttggaggcgagctcctcggccttgcggctccaggtgttgaagaagtcgaggatgtgctccatcgggctgtcccctctctccggccgcccccgcggcggcgccgccgccgcctcgcccatgatgacgtagggcgggagctcctggtcgcccctcgccgccgtccaccgcgccgcctgctggttctccgggtgcgccccgggcgccgccggcgggcccatctgcctcgtcccccacttcgccgcctccggctgctgctgctgctgctgcggcggcggcggcggcgcgttccccgtcgtctgaggctctgccgccggcgccggagccggagccggagccggggcaggggcgggggtggtggtggagtccttgccgtccatggctgggtgagtagctgtagctacgagagatcgatgaggaagaagggaccgagagagagatggatgatgctggaattgtttggaaattggaaagagcagagatgaattggatgagcggtgtgatgggtttttatagcgtgggccgtgctgtcggtttggatgattgggatgtggattttcagtatgttccttattgcttgcatttttatctaaatatttataaaaaaattaatttttaataaagatagattaatataaaatatgtcactacataaacgtatagtcaaaattaatttctacaagttgaaaaaaataaaattggaaataattatcggatatttgtagttatattttttttacaacttgtaaaagttgaatttgtgttagcatatttgtgtaatgatatattttatattaatttatcttgtggctttttaatattttatctataactattaacatatacaaaacgagaggacatataatcgagggatgaaatcacttttccggatgattggcttatttgtggagaggcctcctgtttacctctgtacagaatccgttgtctaaatttaaattttgaaatttagttgtacaactgattttaaagtattttttatcaaaatttattttttataaagatgtgtaaatcgctaagaaaacatatatcaaacttttatcaataaaatattgttttcatgacatattaacagtatttggctataggggacggagccaattgctgcggctatcaagtttaatctggtaattacttaattcttttaccattttaataaatttaaaattaaaattttacaatttcaactataataactttaaaagtatttagtttaatgatcctagaataatatttattagacatgttcgtaacgtgcaataataaaaaactatttatttattctatattataattgaaaaaacatagtcagagactcccagtgtgtacttatgttgggactataaattttggaggccaagtaattattatctaaaacattagtatgaaaccggagactactgtattaaacacgaaggcccgaacgaagggcccgtttagtaaaattttatcccaaattacattggatatacggatacatatttaaagtattaaatatagtttaataatgaaaataaattatagattccgccagaaaactgcaagacaaatttattaagcataattaatccattaatagtaaatatttactgtatcaccacattagtaaatattcgtctagtaatttcctgatgaactatgtaattgattttttttacattaaatattttatgtatgtggtagcgtgaaaagttttgtttggaactaaaaaggccctaaattggcaaactttaaactagtagcacagaaagtgaaataaggaaatgattaattggagagagtagtctgagtcaaattgattttcttcgcgagcaagaaccttcgaggcgcggcatccaactaatccacgaggatgcagcgggcctacgtggacacccggaagcttagcccaggcgacaacgtgtcctccatcccccttcttttctttttccttccgattttattccttctgtgaagacgccgtcgtcagattagcgttgctcctctctctctctctccaatgtgaacaactttttcttctggaggcgtcacgcggtggcggttcggccggcttccacgtgtcacgccgcaggaaaaagagaaagaatcgaccatcacctattcctaggggtgggcatataaaccgagtaccgaacctgaaaaaaccgaaaccgtacattgaagactgaacactcggtcatcgtcgtttgtttaagcatagaaaacaaatggttaattggttaatttgatccataccattgaaaatatggctattcagaaaaatatcattttaattcgcctatatatagccgtgtcacttatattttacaaaattaggaccattccattgccagtgggttttccgtcttctccctcacctctacgtgggacccacgtatcattttcgtcttcttcctccatcctcctctctttttcttctaccacttcttcgtttcttctttctgtgaacacaagtagagcacaaggaggaaaggagcagggcgtcagtcctcccagcaaccacagagcactggaatctttggctctttgcagtgtagcaacgcaccctccctgacgagcttcggactgaccgcggattaatgctcaagcgctgcggcaagctgctgagcagcatccaggcgttcacggccggcgacgactagtacccaagcctggtgtccatggtcgacgcggcgacgttcctcgctgacgagctctgagctgagatgaggcgcgcgcacaaacgtggaggtagatcgagtggctggtgttcaaggacctcgtcgtcgtgcagatctctttctcatcgtcgtcttcacaagaagagtgtgaagaaagaagcgtcgccacctcccagccaccggagcaccggcgccccactcctctcctctacctgtgaaggaagaagaaacgaagaaatggtgaagagaaatggaaagagaatagaagaggaggatgaagaaaaaagataaatctgatggatggttcccatgtatagatgaaagagaagctgaaaaacttaacggcgatgacatggttttaattttataaaatataagtggcataattataaataatcaaattgtaataatatttatctgaataccattaaattaacccaaaaacaaaagaccgaacatactacgatcaattcggtcatcatgcctggctaaccgaagagaccgacaaaccgaacaaacaaaatggcccaataccccatcaacccaattgaagcaagcaagcagcccaatgggccaatctcaactacaccaatcaaagtagtccagatccaaaccctagggcctaggcagttctctgcagggcgtccagatccaactccccagcgccatgcctcagttggctgtgtcttccgccgagcgtgtgctactgctaccgcgccacccccgacgcgcccttgttccgccatggagccgctgtccaccgcgccacaccgtcgcccgtcgccggccgtcgcggctatgttttgccgcgaagctacctagcttccaccgcgctgctgtgccgcatggaatcatcctacgcagcagagggggaggtcttcactcttcagcggtaagaagatgtgaggctgtacatgttcggtcaactcgatttagaccgaggaccgaaccgaactatcggttaaccgatctgtcggtcagtactcttctataggtgagttcggtttccttttctcaaagaccgatctttttaaagaccgaattaaccggaccgacctttcggtctacaccgaatacgcaccactagctgttccattccctctattttgggccatcggtccgccaagcgatcgaactggcggttcggcaatggctatactatttttctttttttttttttttgaaaaattcacttttactctcttcactgttggctgtatcttatttatgccccttaaccacaaaactgattatattgacctctcatctattaaaaaagcagtgcaaaaaatgattcccacagttgttttaagggtgtttttcgcttacgtggctcgttgagctgatccaactgactaagttagcatgtgggcccacatgtcagtgtcgcctcctctttctcttcctctcttctctctcttttttttttctcccctagctatcctctgactccgagcaccatgcctctcccatacggtttttcaaaattgatggccacgaagccctcatccaagccgactactcctgaactgacatcgttaccaaatgatctcatcttttcgcttatgcttatgcttatttgccaaaatttaaattttcaatcttaaatttaaatttgtagttgattttagagttttttcatcgaattttatttttcagcctttgcttttatatcgctaacaacacatacatagtttctggttaattggttacaaagtttataattttttttctacgaggttgtagccttttataatcttcttttgctgcaaatactattcttcctttataaaatacactactaggcaaatgcctggtagttttctcttaaaaaagttttatttataaattattttttatttgtaaatatgccatgatgtgtttgaaaaaccctactggctgtcagtgcccgagatcaagtcgaacaatacggcttgagatcggctacaccccttcccctggatcaacatacagatttttttagataatgggaaggatcaacatacagatggaagacacggcgtggtgactaactgacaacggattcaaacggtgctgcatatcttctgacaacatggtggatcgacatgcccagacagctacacgtccggaggcaattcaacgactaccagcacacaaggagttcaatttaggagattagaatggcttaaaattaatctattgattttatagatatagccaacatatatctacacaggtacacaatattttatatataatttaccgtacctattttcagatccatacaatattgtcaggtgcgtaatttattatgtttacctaaaagcatgttttttttacgatatctgttatgcgaacgtctcctatattaggcctatacggtctaatagtgggggctcgctatgtttttctatagaaatcatgcttgtttatggtttacataatacatgatatttcatccgaatatgctcatatatcatgattatactagaagatttagttttttgagtacgcatttggtattctctgctatatatcttgccttctagaaaatacttttcaggaacaatcgagcattcgagtagacagtggtcgagtacaccccgtcgtcgagaactaatgcggagttgtcgaaccaaatctaccaacaaaaaccgatgacatatctcacatctaacactggtcatgtccggactatttgtgaaaagggtgttgaggacaatctcttcacgaaagttgtcagcttgatcatccgacatgattgcgaatggacatccgatatatatgctactagttgggtatgtgagtcatgctggccacatgatatgtacacgtaataaccaactctagcacccctaaaagtggtcgagggatgactatgtctggtcctcgatcagcgttgtagcgatctctcaccacctatcaaagttaccttcgggtggccgagaaatgactttttcgacggagtagatcgcgactaggtatttgtagagtatggggatcgttattaccaaggtatacgcaagattgaggtaaaagaggcggagacatggacttttatacaggttcgggccccttatatgtaaggtaatagcctgtaacgccccgattttcgttcgggattaaaaatcatttaataatgcatttcctagaaattgaataaaaagttaagcaatttaatcaagtgaaataatgggagaattaaaattttcccttaaaaatcattggccgggaatattttgcaatattctttgtgccctaatgtactctccggaattttccgtgaattttcggagctcgagaaatagttttaaagtcacgaagatcatttaaccaattaaaataaaaagaaaacaaataaaatcctccctcctctctttgggcccctttcggcccaattcccccccctctctccctctcgggccggccttctccctcggcccgctcggctctctctctccctcaagtctgctttgcctccccagccggcctctccctccctctctctccgacaggtgggacccgaggccccacctgtcatcttctctcccaaccgtctcctcctctctccttcccccccccgagccgccgacaggtgggccccacctgtcagggccatccctaacctccggctccctcagccgaaaccgccgccacggcctccccacgtcgccgccgattccgcctcctcctccacccgcgcgctcgccccgaccgcgggaccgcgtcgccccacctcctccactctcctcccccactttccccctccaaaaccggcgccgaaccaccccacttcgcccacgtcgccggagcccactccgaagaccgttgccggtcgattccgccctccgcggccatgatcccaccgccccgagccaataaaaacgatccccgtggtctcctctcccatttccccaactttcccgagctcccggcgccctcgcccgctctcccctcgccaagccgagcagccgctgctcgccggagttcaccggccgcattttcccgccgccccagccaccaccgcgccgcgccgtgtgtgccgtcggcttcgcctcgccgtgccgcgccccggcctccactccttttcccccaaaccaccaccgaaataccaccccaccgtgaaaaccgagccgccgctcttccctccgtctccagccgctccccgccggcgataccgacctcgcccggtcgtgcggctgcctcccacagcgccgccgctccgtgccgcatcccggccaccggcccactcctcaaatccacccccgaagcaccattcccgccgcaaacccgagccccaccactaactgccgccaaccggccgcctcttgccgccatccccatctacctcacgccgcgccaccgcctccaccgcattcgctgcatcccaccgcccctcggccgtggctccgccgtggtcgggcgtcatcggaacgccgttctcgtcgactcccgtgccgaccgccgccatcctttccgccgccggtcgcctctccgtggtcgtctcgccgtcgccgccctcggtgagcactcctctcccctccctctttctccccttggccggccgcctcccgtgcttgcgcgcgccgtgccgccgccgccggtggccgcccggcccgtgtgccgccgtcgcttcggtcccggccgccgccgccgccagctttgtgtgagcgctggccaggccgcgccgcccggctgtccccagccgtccgatcggccttggccgatctgggccgttcacgtggtggacgcgcacccgaggcacgtgtggaccatgtccaccatgcgccctccccctttgactcgctgacgtgtggggtccgcgtgtcggcgccggccgccccttgctgacgtcagcgaggaccatttcctttgtaaaaataaataataattgcgcaataaatcgagtttaattctagaaattcatttaaatggctcaaaatttctaaaatccatatctaattcattcgaactccgaattgagccattcaacttgcaaaattcatctaaaattgagctctacatgtttgtttagtttttatgtactgtttccttggtttttattagagtttttcctcgttttgcgtgccagcgtgtagtttccgtcgtttcggaagtccgcggtcgcgaggaaaagagttcggaagattgttttgaagaagcaaggcaagtcacacattccccttgagcatgttgatcccaatttacaaatgttttactgtttgcaaacaaatatgcatgttttgctaattacatggggtcagggttttacctatctgctcgcttgtgccatgtttacttgatatctgttctttgtcaaccttgggtaatgaatcgactagctcatgttacttatgtgacctagctagaactatatgcttagccatgcttaattaccactagctcagttgatgggataattgcagtattagacctttttagtatcagagtgagctgcgtgctcgagacacctggccatgcttcatggtcgtaattatccaactaaaatgcgactgaatggtgggctgtgggtgcatggttttgctggtcgcacccatggcagttaaggaccggttcgcgggatgccctggaagaacttatcgtacttaccacaagccagcgtgggcaacggctgggcttgtagtgtagcttttctctagccgacgtacccaggcgagggtgggcgtgatggagttgggtcggccggggtgtccggttgatcggcttccggattcaccgcggcacgaaaggggggctgcccgttgcctgctggggacgggggcgaaccctaaggtgtggtgcgatcggttagagggggttatgcgaagggtcctgtcacggcctctttccggtatgtcgtggtggcatgtcggcgcacggaaacgtgtcgtggggctgtgtcttgtgggtacagttgtacacctctgatcagagtaaaactattcgaatagccgtgcccgcggttatgggcggtcgaccagattcaccgtgattagtcccaccttaataaatcgacccaatgcactgtagtacaggtgggttggttgggcctgttcaacgtggtgtagcgttgatcagtggagattttaatgttactttaattactcaacagttttactgtttgctaaataaaatgttttacaaccgcctttatgcaaatagccacaaaccgtccttgtgttccccttgcacgtctgcatcgttggtgtggcttgctgagtacggtggttgtactcagtcttgctattattcccccttttcagaagtgtagtgcttctgagctgaagacgaagttagaggaccaaggctcagaccccagttgagttttgcctgtggagtggagctgaagccccgctaggatcgcctttttccgctgctgctgttttcgtttcggtgcgaggactaagtgcctcttttgtaagtattttacgctttatttatgtttggaactgtatattacttgtcgttttgtgtaccctggctggtcctggacagggatttaatacacaaaatagtctggaaatttgggctaaatttctgggcgtgacatagccctactcttgttagctgaagccggtgttgctcttattcatcgaaatcacgcaagtaaaatatttgggataacctatcttgtcgtcgtcgacttggcggcatggaacaccacacgtagtagacgatgggatagtcttcctcctcgaatgcaaacttgacgagatcagagatagtgctagatctctcttgtctacctctgtggcaccgaattgggtatgtcttggcttatctctgatgtcgatgtctggcagcgtgtattggtgtctattctgactgagcgtcccccctctcctctagggggtcttgtatttatacccacagatgtcctcttgtccaagaaaaactagggagacaaatatggatacgattcgagtagtctttgtaattttcaacttgaactctgcttctccttccttatccggaataccttccatatgcgaggaatgattctttataagacttggtatatggtggaccccgtcgagcttaacccaagattattgggtatgtgttatccataacattgacagactagacatgttccttggctagtgttgaagcaatctctcatcatctatcagttgtcttaggcatctggtcctcgaccagcgttgtagtgatctgtcaccacctatcagagttgcctttagatggccgagagatgactacgcctggtcctcaaccagcgtcgtagcgatctctcaccacttatcagttgccttcaggtggtcgagggatgactacacctggtccttgaccagcgttgtagcaatctcccaccgcctataagtagcctttgggtggttgagggatgattacgtctggtcctcgaccaacgttgtagtgatctctcaccacctatcagacttgccttcgggtgatcgagaaatgactacatctggtcctcgactaacgttgtaataatctctcaccacctatcaggattgtcttcgggtggtcgagagatgagtacacctggttctcctgtggatttcctttaaagaaaacatttcttacggtatttatggccccgaaagaatttattcatcgagtcgctttaccttgtttaataaaatatgcatcgcggttatatgcagtgtgagcggctgccacctccacccacagtttgttagaacacatgcttctgccgatcgaaagggtgggaagtttcacatggcttttggccctttgcaactgcatgccaccaaacagagagaggggaatgaaaactttttcccagcaatttcaccggaaagcaaaaaaggagcacccaaattaagtacactaacaagtacactttgcatgaattatattaaaccacggatgggattatttatgccgccggcgtgtgggcacaatggcgcacccagtacaaacaagtttatcttgtttttgcacgattctcacatggatcgatttcttttgtatagtttaatttagacttgattactatctgccattccctgacaggacttttttatatcacttgacatattataaaaatcacatcaaatatagctacagtatgattataatgtaagtataatttaaaatgcatataactataatgtaactcatgggaatcccatgtaagtacacagaaaaacgcaattgtagaggcaagtgcgtgcgcgggatcgagttccgcagcgatgcgacttttagtttttttctctcgtagaatgattttctttctcatctaactaaagataaatctaaaaaaaaacccgatatatcttttgcaaaattatttgtaaaaatgttagcactaatgatgttgtaaaatcagataaaactaaaaaagaatctaatgtcgtctagggcatacaaaatcgtacgttagaataatcatacgtctagaattaatcattaatcgcaacagaaaatcatacatcagaaaatctgtgtaccttcacccaaaaatctgtcaaaaatctatagcaaaatcgtttcctgcatggaaagaagtacgggtgaacttccacaaaagattgaacatatatagacctgatacatcgtttagccctaaactttgtgtattgttcacttaaaccaccccaccctatactcttctccaagcaacacgaggaagcactagctagttacacaaatttaaatccgtgtcggtctaccacggctggaagaactactaagtaaaattttcactactaattcacgagaaaaaccagtactagaatatttagggtttataaaatagaccttcttcccttttgttcttatcttaactagcgcgcggttagcatcattatattttctcccatataatatcatatatgttttctctatgtattattcaaatatattaaaatgacaacataattttaaattttgtactaactttacgaaactactaatatgtaatattcatattgtatttgatatatgtgttagttattaattatttttaatatcaaattttagttatttgtaaattatattcctatatcgactctagacttgtcttcaatatttcttttttaattttttttttcatattttcattatctgtaaattgtagttctatatagactctaggctcttcttccaatattatttatttttaattctgaatttttattatttctaattgtatttctaggtggactgtaaaatcatctttcaatattcttaaattcttaaattcgaatttagttacttctaaattgtattcctatattgactttagacttttcttcccatgtttttttaatttagaattttagttatttgtaaattttatttttatacgaactctaaactctacttttaatattattatgtttattttgaattttagttagttttaaattcatatatagactctatactctacttctaatattccttatttttaattccgaatttctattatttcttaattatatttctatatgaactctatactctacgtacttctaatattccttatttttaattccgaatttctactatttcttaattgtatttctatatggactctatactctacttctaatattccttatttttaattccgaatttctattatttcttaattgtatttctatatggactatagtctcctcttccaatattcattattttaattccgaatttcaactatttctaaattttatttttatatggactctgtttttctttttctctaattaatatgagaatttctaggcagcgagagcgaacgtggaggctcctttttctattcctttaataagttaatagatttattcttaatctcgtcctttccttacacattgccactgccgctgctttcctagtggccgcatctgacagtgaggaggctagggatcgatgtcagatttgataaccctagcctccccactgttcaatgcccctctattctcctatccctctctactcgccaaccaccatccctcaactatccacccggttttgatttgccctaacacattatcattctcgattcttggaccaatatatagtgatagttgtcattggctttttctgtaccacatgcgtattgtgggtttcgaaacctaacagtatttgaagttttgaaaccggtagtgattatgattttttcaaaggagaaagaggaaaagaagaagaatactttatgactcgtgtgtttggtgtaagagggtacaaataccgcggctgatatatatattcaccactttatttggtggtgtagcattgtttatccgcgacttccgcgtagagtggaatatatataatttcatgcacgcacgcggacctgacctaactcctcgatcggtcgtagcttcgttctgtgacctcatcatatcaagtaagctaccttatgtgtactatttatacagtggttcattagccagtaggttacaagaaaatccttttcacgaccaccattatattgatcgagatgagaggattgcaggccgccgtgctgttcacggcggtggcggcggcggcggcgccgacgaactgcaccacccgctgcggcgacatcagcttcgagtacccgttcggcgtggagcccggctgctaccacccaggcttcaacctcacctgcagcagcaacgacaccaggctgttcatgggcgacggcaccgtgcaggtgctcgacatctccatccccaactccaccttgcgcgtcaacgccaccgccatggcgttcgaccccgccgacgacgtgcagcgcggcgtcatcaacgcgacgacgacatggcgcgccgccgccgccgccgacgacgacgggggcccgttcgtcgtgtcgaggcgcaacacgatcgcgctgatgggatgcaacgcccgcgtcgacctccgcggcggagaccgccgccacagcgacaacctggtcagctcctgcaccgccgtctgcccaccggtcggcggcggcgacgacgccgcggctcacgacgacggcgacggcggcgacggccacaccatcgcgatcatcgacgcctggaacggcaagtgctccggcgtcggctgctgccaggcaaacatcatgctgggctacccttcctacaccatccagatcaagcagctgcaggagaagaacctccatagcttcgacttccagtacatcgcctacatcacggacgagacgctgaatttcacggaagagatcgccggccgcatcgccactccggcggcgctcccggccacgctagactttgtgatcagaagcaactcgtcgtgttcgacgccggcgaactcgacggccggcggcgagtgccgcagcgaacacagcttttgtgaggattacaagggtggtggtaataccctccttgggtatagctgcgtctgctcggagggttaccgaggaaatccctacgttgctggtggatgccatggtacgtgtgtgctcgctcggatgattaatgttggtcgttttagggctcgtttggtttaaatgatttctatatgaaaccttaggacatctatcttctatcttctatctattatcttctatcttctatctatctatctatctatctatctattatatactaaaagtccattaatcttcctacaaacgctcttaagccgccacttggcgctctaataaattagagaaatcaaagaaattctgagaaaaaagaaaagcatctatccgttgattttaaaatagtgggtccactattagaaaccgtcagattaactatattgatcttaaaacgtacaattccacaccatccgtaggtacgtacgtacgtacggttccatctccctccctcctttttcttttcatatatatataatcgagataacagttaatatagttaaattttatataatcactagcaaaagtgcccgtgcgttgcaccgggtgattacagagtgtgtatattgaccaaaagtgttgtttggtttagcaaaagtgcccgtgcgttgcaccgggaagtttacagatcagaaaaatatgcaattaattaaaatacaaattcgctgaaatatttggtatttttaagtaggtatgtgtataattaaataaatttacaagtaaaattctccattctccatggttaaataaaatgacatggttaaatttaattttattaaattctccataattagttacgctctttggaattttattggaattttcagagcttaattgctaattttattaatacaaacatcatttaacaattatttaattggaaaaagaaagaaaatactttcttataggtttgcttcgaaataaacatattcaatagaactataattgtaatgcttctgaaaaaatgagcactaaaaatgtacttattctctgtttttcggctcgagggaccaacaatagacttatttccgacctatgccggtcggcccacggccttttgcgcatgcgcgggcgcacttttcctcccccaggccgcaacctgggcttgggccgaaaaagaggcctcactctcgatccctcttgggccgatttcggcccggacgacaccggccgtccgatctctagggttttgatcggacgaccgagcgtcaatagtggggaaacaaaacccactccctctcagccgcggaaccctagcccattccccccctcccatctcacttcgccgccctctcctccgcgcccccgagcggcggcggcgacgacggcgcccctcccccaccaccgatggcggcggcggcggcacccccaccacccacggcggcgtcggcggcatcctcccccaccaccggcggcggatctagcgggaggggaggcgccccgcgagcggcggcgacggcgacggcgcccctcctcccgcgagcggcggcggcagcaccctcccccaccaccggcggcggatctagcgggtggggaggcgccccgcgagcagcggcgacggcgcccctcctcccgcgagcggcggcggcggtggagtcctcccccaccaccgacggtggcggcggcgctctcccccaccaccggagagtgccctctgccgccgccgccggcggatctagcgggaggggaggcggcggcggcggtgctctcccctccaccggatccacagcgacggcgacggcggcggttcggcaacgacggcgacggcgacggcggcagcggcggcgacccccttcgatctaattttttgtttttatttggatatatgtgtgctagcggcgacccccttcgatctaattttttgtttttttgcaaagtgctataaggctgcatgtgattctttgttatgtgctatgattttttatactatgtatgtatatatgcacttgttctcctggtgatgctaaccgaataggacttggtataattcaaaccaagtcctattcgcccaaacagaaacaaagtcctaatcagctcaaacgaaaacagatgggagtttgtttcctatttttgtggaatcggacatattcttttaccgcgttgatgaatcggattcgttccggttttttttcacccggtttttttgacggacgatggaagcacctcttattttttaagtagtagtagataacttatatgattatattatgatatatctctttccaaaataaagtttacaccactatatttttacccattaaataaaggtatacgtgaaccctttatgtggagcattattttcaaataatacactatttaaataaagtttataaagtttatatcgttacattctgtacgcattaaactaacaaagaaatatattaactaatttatacttaaacgtgctattttagactttttaataaaggccggattaattttacgagtctttacaattatttgtaccataaattatatatctatttttatttttcaaataaatatataattttaatatctatattagatttattgcattctagacctacatccatcttgagtgctccactaaataaaagaaaatattaaaatttgtcattgaaaatcaaaatatgctagcttattttttaatgaaactgttaaacccattaaaagtacattattagacatctaatgactttctaccaacttaattaatttcttcataaaaaaactttattaattcctcacaacatacacgtgggggctatttacatatacgaattgatcttgatgcttttgtaaataaatgatattttaaatttaaaagataaataaacgatcttaaaatgatcatagcatctaaatcatacatatgattgctcctagcactcctaaacacttctaagtcgctatgtggcattctattaattacaaaaacactcatataatcgaccatcggtttccacttaaaccgatggacccaatttttataccatcatatctatcttttcggaaaaaacaaattctatcagaatctctgtctggctcactgcataacatgcatgtgtgcgctcctgtaccttttaaaccggtagaaccattgtttgtaacaagtgtttattcatggtacatgacattttaaaaatattactgtgcaatgatatttcgacgttattgtattcttgctaggttgcgtggagcctctcattcactctacatgaaatgttcataggtagatcgcctctcaaaatatatcaatcatattaggctatataaacccgtgcattttttgtgtagattaatgtcccacccaattcatcctttaacatattatgataatatattatacaattaaaaaaataaaaacaccttaatttttattttacacttacttttactttcgttgacatgttttctaaaaaaaataaatctaccttttttttaaatgatgaagaatattataaataattacttatagatactacttatatttgatataatataaatctaataggttagaatattattaaagaattaattaatgctgacaaaaataatgtatggagaaatcgtggcagatgttctcctgttaaatgtcgcttttataaatacctcaaacttggcgtacgacgcatgcccgcgcgaatgcgcgggctaccttcctagtttttttaacaattgttggaattgaatccttaggatttttttcaacatatatcacttgtttcataagaatggatcttaccaaatttctaaggatggtagtcttacgagcttattttataccctctccgagctgataatacttgtatcgttttagacaagagtaaggtcaaactttaaaatctttgattatgaatcattttaaaaatatttgtctttcaaatatggtgactatatgcatagattagtcttaaaaagtactttaataaaatcatatatatttttaaaatatttttatacatattataataaaaaataatggtcaaagttatttttaacttttttgaagaccgtgcccttgtcttaaacgacaagtattttcaatccggaaggagtacggttcttaggatgagatgaaaccttttttggaaaaattcctaaggaattaaatagatgtgatattctaatcctttactttacgtaatttcttgatttggaaatcctatgagccaaggattacaatttcgatttcacccaaaatttagctcatttcggttctaccaaaatccctgaaatttctggatttttgggccaaaatttcttgaaattttaacataatttaactgaatttgactaaatttgcaaaattctgagagaaaaaggaaatcttggccgagataatcacttgccgggttggaaattttgaaccaaaattgcaatcctgctatgaaccgaatagggcacttagaatgctcaactatatatgtcttaattaaatactacctccatttgtttttgcccagtttatatctacgcaatcttcaatacacaatttatcattactttctaactatgtatgtttatgaaagctttaaaagtatagtaacaatataagtgttttttatgacaaataatatatcaattaccattttctcttctctaatgttttcattaaacaatcatttaaagtttcaaggtttggttgcataaagtaattttagatgacatctatttaagaatattagtactaacacaagttgttttagaacttttatgcattatcttttctgttttacctatgtttgatttttctaaaaaaaaatgtgttaccactctctttagtataaatgatgagcagtaaggttattttccttctttcgatctgtgcatacatttaaaaggactgtttctgtcaaaaattataaaatacttacatttagaatcagaggaaattaatatcctagtcattggtacgtccctttatttcttcaggttcattaatgtttcaatgactcgcctaactaaaatatacgctcatgattatttgttagatatcgatgaatgtcattcccctggctactgttatggagattgcaagaacacagaaggagggtatctttgccagtgtcctctcggcttaacgggcaatgcttcaattccaaatggatgtaaaggtataacgacttaactaagtagcgggagtattcagttaggcatcatcaagtccgattgtttttttttttgaaaaatatggcgccataaatatagctactccctttcaaattatataacttcgaccactaatttgtgctctccaatgtttaataaacatctctaatattacaatatatattatgtttaataaacattttaaatattacaatgtatatttttaataaacaatttctaacaacatgtatatgtgatccctccgtttcagataataagtcgttttgattttggttaaagtcaaactactccaaatttaatcaagtttgtagataaatatatataataatatttacaacactaaattagtttcattaaatctataattgagtatattttcataatatatttgttttgagttaaaaatgttactacttgtttctaaatatatatttaaaaagacgatgagacaaacttttgaaactttagtcggatgcttatcaaaatgatttgtgtttgtgaacataggaagtagttagcttgctagagttttatgcaatattggctccccatatatggctatgttatttactaatctggcttttctcttgacttgttatcgttcttctttcccatgattaattaatttggtcatcatatattcttctatgttatatttcttctagacattgatgagtgtatgcacccggaatcttactcatgctatggacaatgtgtgaatacgtttgggagttttcaatgccattgccacagtggaaccgagggggatccaacaataagaggagggtgtattaagatcaagcattctgtgtcaagtaccaatattgtactccctccatcaaagaatacaatccaagcattcaaatcttataaagaagattacaattatagagtactactttctatccaaacacctctcgttcaaattttctccatcttagccccaaccaccatcccactcccaaccacctcttatttactacaagacatctaagatattttcctttcctactagtttgtcttttgaatgctatgattgtattactgttaggacaaatggagtaacaaacacacacacacacacacacacatattacttatttatttatgtatgttcttgatccaaattcttgaattctttcctttacgaattttcaggtttaacaattggtttgggagttagtggtggcataagtattttaaggaaaaggctatacgtactaacttttttttactaaattcttactaacactgatgtgtcatgctatgagtccatctagatttttttataacttccatctacttaaatcaaacggttgagatgattgttagtaaaagtttagtaagaaaaatttagtatgtgtagcattgctcgtattttaattatggcactttctgcacctttcatagtacagaaaataaagctacataaggtgaaaaggatgaaagagatatttttcaagcaaaatcatgggctactcctgcaacaattgatgtcacaaaatgcaaatattggtgaaagaatgatattgaccttacgggagctagaaaaagcaacggacaattttgataaaactcgtgaagttggtggtggaggacatggcattgtatacaaaggaattttagacttgcattttgttgccattaaaaaatcaaggattgtagtgcaaagagaaatagatgattttataaattaagttgcaatcctttcccaagtgaatcatagaaatgtggtgaagcttctaggatgttgccttgagacagaagttccattgttggtttatgaattcatttcaaatggatctcttgatgatcatcttcacgtcgatggacctatatctctatcatgggtggaccgaataaggattgcacttgaagttagtagagccttggtctatctacactcagccgcaacaacaccaatattccatagagatatcaaggcatctaacgtacttcttgatgataatttaacagcaaagatatcagactttggagcttcaaggtacattctaattgatcagactggagtgactacggttgttcaaggaacaattggttacctagatcccatgtactactataccggtcgtctaaccaacaaaagtgatgtttttagttttggtgttcttcttatagaactacttacccgaaaaaagcctatctataggactgatagaggtgatagtcttgttccacattttgcctcactactggaagaaggcaaattggttgaaataatagatccccaagtcaaggaagaggagaatggggaggttgaagaagtagcaacactagcggcaatgtgtactaagttgaatggacaagaccgaccaacaatgagagaagtggaaataaggcttgaaaacttgcgagctaaaaccaaacatgctccatataataaagaaccaagtagatatgaagtatcccgagttgcagggcattgcatatcagctagaggggacatcgaagaagtactaataagtagacacagcatggaagatgagatgttgtcgttagaaaggtatcctagatgatatcgtgtttccgcgtctctaatcgccataatattgtttagtagaggaatatattgctactttctacattttttttcctttgtgtaatgctcttttgtaaaaagaagaaaatgccatggctttgtttcatgttacaaaaaggactaaggccactctgtatacattaattggatttgaaagatctatgcactagagttgccttgtaaggggagattggaatatctatgatcctaagagtgcggtgattgttttggtgattaatgacaacccattgttggaactaactatttccatgagttggtgagattaggttaagttccggcatcaagttaaaagattaaagctagaagatggacattataccttgatgaggagcaagtgaagatattgatgatgcggggtatgaaatggctatctatggcaaaccggtgaagagaaagcaaagctaggctagaagatggacattataccttgatgaggagcaagtgaagacattgatgatgcggggtatgaagtggctatttatggcaaaacggtgaagggcaagcaaggctcggctacaatggaccatgcggggagaggcttggcaccgatggaccgaatccggtagtgaaaggcgagtgaaggctttgtcatgatggtcatgatggactgtgcgaggccatttgaagctatgagtaatccgtatcaattataagaagaccgcgagatggaatgccgaggatcaagaggatgtggttcttcgatgaacatcaagtcaaaatccaaagtgggcattgatcaaggcaaaggtataattgatttgggactaatatgcttaatgagtgtaggtgagaatagtcccaatagtgaaatggcgttgacgttgacaaccctcaaggtgaagcaagaagatgacattcctagtggtgtattagtcccaggttgcttagaagtggactaggatgtttggagacccccccaaaacatcaaaatcaaagcggcgagaagactcggagctgagttagactagtttactttttcgctttgagtttaggaaaaaccgtactattaagaggggttccaagtgtggttctgagataacacaattgctcttagtggtgtccaagtgttgaaatatttttaggagctgtttttgaaaatggctctactcggaacagagagtcccacccggaggttctgtccggaacttcctagcgccgaggtgaggttgaaaaatttcctaagtgctgcctggaagttcctggcacttttacccgaaacctcctggcaggtttccagttcaaacttgtgagtaacggctagatgacgtcacctagccgttatatatatggatctcgtccccaggtcaccctttggccattccacgttagttcttgtgttccctagcttgttctagcctcttccaatgtgattttgcttcctccacccaaatcttgtgtacttcttgagtgagagagtgattttgagggtggtggtgaggattggagaaggttttgaaggctaggatgacttgagcacttggggtatctcgttgggctatcatttgaagcttgttactcttggagggtgacctcctagacggttaggtgtcgcccgtgagtttccaacaaggttgtggattgacccgggcaagtttgtgagggtgttattccacctccgaaaggaaacggaatacacggtgagtgaattccgagctgaggtttaggaggtcgttttggtagagcaagcctcacttgtggtgttctcttggtgttcaagttggggatcttagtggtcacttgaaaccaaagagaagtacctaggggtgttggcttgaataccggagacctcttcctaggcctttgcttggtgaggcaaggggttaatcaggatccggctctttggagctcctcaacggagacgtaggattctcggtggagaatccgaacttcgggaaacaaatcgtttgtctcctctcactctctttatctttgtgattgtgatgcttttctccttatttgcctagttgtgctatcatgtctcccattgtatgatcacttgtgctatcttgtatattttcatgtgtattactcttgtttgagacatgttgtacctctctatggtttaggcttccttgtgatttaatttacttgttgtgaggtgcttgaaatagcaattcacaactgcccggaagttcctaggaagatccccagaagttccgggcagctttctctgcttgtgagaaaaagctgccaggaagttccggaccttttgccaggaagttccgggccctgattttaaccgctgcgatttgaagtaaattttagaaacacctattcacccccctctaggcgacatcaaggccctttcaggattaatcctgtgttatatgtacaaaataatctgacaaatatccttcgtatgaattgtgaatataaaatacgaacattaacaaaaatagaacttttttccaatcttatttatatcactgaatgcatggatataatatctaaacataccaagtaaattaggtatcattttcttttgaatgttcaatatatttagtattatataatatagatatatagagttagaagcaaaatacatgagagatagaggaatgagatcctctgaagacattttccacccttcctgcatgacaagagatatgcggataagctaggtgagtggtattgttacaaacaaactgagaactgtgaatcaatttgtccctagcatcatgcgcctgtcagcctttctattgatctttcttggaatccagttcacctgtagatgatttccttgtaccgcacactgcatttcactgagtattggtctgagactccagtgtctgggatactcctggaaatctcctttactgaacgttgatgcaattgtgctataatctgtaacgtggatcatatctgcaaagttcaaaaattatttgagcaattacggaggccaattgtagagcaatgagtgagttcagcttgaagtggggacattcccatggcacagttcgctttgatgaagaatgtattatgatcatcagggtgatggaaaataacaattccaatgcataatctgcgatctatgtagcacctatttcttacaggaattgaaaaggaataatttacaggaattgaacaagaacactttcaaggaaaaaaaaaaggaatatatcaaatccacccattagcacattgttaacaacgaaatttggtaagccccgaagacatcatcggcctagaatcagtattggtttcagagtcctagaatcggccgatgagaattattacgtcgccaatagtcagattcctgctatattcggttaaggaaattaatctactaaaggaagcttatccagaagtaaccgagttcaaggaggatacggcatggcaagttatctattaattaggaatagtttgttagttcccttttatctgtaggaaagtatgtttagtatccaataatgactttatgacttctggattacttcaacaaaacgagcgaattcctcgtccactgacggtttcatactccgttgaggaaacggcagcaaccgtacgtgtgtcgcagtactcctgcggcactgtcttttctagctgaacttccttgtcagccgaatcactagatggcgcttctttggcaatctcgttagttcctgcagggttaggatatggcagatcacgagtagacttacctcccctcgtcgtgattgccttagacattttcaacggaggagtcaggttgccccagaatcctcccagtttcatttgcagggactaaggatgccaattgagctagctgggtttctatcattttattaaaactcagctggttttgaaaagcagaagcgaagccatctaacttgacatttatgttctctaggatcttgtcattgaccgcaagctttttccttagcgcatcagtggttttagcttacgcaaaaatgagatccttaaaggagggctggttagaaaagttaccgttgttgttaccttcttgataatatgagcgtggttggttccacccctgacctccttgtggacggtacccattgttgttgcccatgtacatcgcctccttatgcgtttccgggcagtcattcccagaataacctatgccgccgtagacctcacatgtaacatgtgagtccaaggccttgacggtgccttgtggccgtttctcgtggtcgtccaagcgtttcatgaggaggcccagcttggcagcaagtaattccgtctctttgacagtgtgcatgcctcgctgacgggtctggagtcgttcctcgctccaacccatattggagaccatcttctctattagatcaacggctccttaaaccgttttagagaagaacgctcctccagctgccgcgtccaggtgatcacgggacatcggggtgagtcaattttaaaagttctgcaggatcagccagtcgtccatcccatgatgaggacaagcggccacgtactcttgcagaccctcccatgcttcaggaatagactcatctcttgtctgctggaaacttgaaatccttccacgaagggcattggttttgcccatcgggaagaatttcgagaggaatgtcgtagagcatttgtcccaggtgttgacagcagcacggttggcatagaaccactcttcgctctcccgagaagggagaacggaaacagtcacagcctgacggcgtcgggactgacgcccttaatggtgtacgtgctacagatctccaggaactgttgcagatgagcattggcatccttattaggcttgctatagaacgggctagcctgcgccatcgtgatgaggctagacttcaagtcgaaatccacgtctcccatgttgatctgcggcccaatggccacattgtcagcagagggagtagcgaactcgcggagagtcttgttagccataatcttgaaggtcggtggtgctggtacggctggtttctctgttggtagagtttttttgcggagcaacgactcgcggcctgacgctccggaagaaagcttctggattttctttgaagttttccggcaagttgaaactagtcatgcactaccctgttttcacaacaaaagtgaaaacaaccaaggttagcctgcaaaggaaaatgattacacacaggtaaatataaagtattagttcaggtaatctctattatgaatcttccccggcaatggcgccagaaatgcttgttggtatttcttaacgtcattactagaaatataattcccagcaatggcgcagaaatacctctggtatattatggttacagagttcatccgcaagcgcacggatataccattgtagcatttcacccgagagtattccaagggtatcgtatttattttatcccgtggaaagatcatgtagagagaacttgattaatattttatatattacttgtgataattatattctaagcagggttaagataatccaagggtagagtgacacacaagcattagctactcattctcataatatattatctaagctaagtgggaagaagagagaaagaaaatctattcctatacttctaatatacatagtatacatgcattctagttaaccgatatactagctaataccctctatccgatgccctcctggtacttcgagaagccacccctgactgccgagttccttacgacagcccgtcatgaccatacaatcggggctaaatacggaggaataccctcctcaggaattaacttaggattatatacaggcgcggaggaatacccgtactgagctgtcatcatcagcggcccacctctcatctgtagcatataaccccaaataatgatatcccgtaatctagacaccatgtctaaactaccagatactactctaatatcatcgtcatgacatagagtaattgcataagcaaatattatacccgcaccaaagcatctcccagataagctagccatatattcaatataacatgaacataatgtaaagtaggtactcatatactcagaaagtatttcaataccataaatgtatatagaagagtattctaataaaagtacaaagcttacaaaagaggaaaggaaagctactagagccatacccgaactcttccgaaggcttccggactcctgatttctactctatttctattccaccagctagatactactaaactaaacttgagagaaatgagagagctcttgcttgaggtgtgtgtgtgaagtgagaagaggagctccttttataggcaggtaatgacggttgtgacggttggaatggttggtaataccctccaaccgtcattggggatcaatcccagctatccatccaaaccctgcatccatcggtgccacgggaggttcggccgaaccctatggttcggccgaaccatgggctggcccaacccagcccatcttcggctggtggcctcctttgttgttctcctccatagacttgtaaattttggcccagtgtgtcgtgtcatttctgatttcttggcctattcatacataagtctggttctcaacatcgtccgattgatttatcgtctgtgttgatgtcgagtctcctccactttattgtcattctctgcaaaaggttagtataccctatactagtggaatattattattctaacagatatatgcattgcaagcatcacttgttctcctctattttggtaatattgacggtcgaaactgatcgataacgaccgtcaacaattatttacatgtgtgatgcgagcaagatttcttttatgtatactatgtacttagtatactcttcaaccaatggagaaacaaatattttctatcttaatttaagagaacattgtaccaaaaaagatatataaaactacaatattttccctatgacattggaaaaatattgtggtgacttgtacgctaaagcacaatatcatcttggatacctttccaacactatctcgtcttccatgttgtattgcctacttactgcttccgtagggtcccctctacttgacatgcaaggccttgcgatttgagatacattacacatacttggttttgtattatctgaagcaagtttcatcttcacttgcaagttttcaagtgtcatttacacttctctcattggctggtcttgacggttaaaacagcaggagaggctcctactgcgcaaatatattaaaaagagaacggcaaaatacaagggaaactgtacagagggaatacaacaggggggaagaaagaaagaagaaaagaccgcctgaaacgcaagctagttaataaatgctattaatccatgattgccacaatggtttttctgtctcctttactctatgcaaatgcagagtaaactcatccttgaaatcagccttccatttgccaaattttgcttggataccattgaagatcaggtcatttcgcctactccagagatgccagcaacaaattgccaaaacttccataaagaagggatgagggaagttcctatatgctgcaatgatcatgttcatgaaattcagatttagatcccagattatgccgaggaaatgccaacattgttgggcaaaggggcaggcaaagaagagatgaagaaagtcttctgtggtcgagttgttgcatgtaacacatgaagctcccccttgggtattgaaatgtcttcgttgcatcagctctttagtgtttaatctgtccaataaaagtagccaaagaaacactttcaacttgagtgtgcatttgcttttccagatgagagtcaagggaatttcaggttgaatatgggtgaaaaacaggtcatagactcttttcggttgataatggggagagttccaaatgtatgtccattggtcttccatatgatttgagtttaaagtttgaagagtgatagaaagaaggtggcattcctgaattgcttggatggggagaggagtataaaagatctcatctaagtgattccgagatttgaaacctttgatagatatgtccttatttttggcaaatgagaatagggtgctcagataatcctctaaaaaacgccctgaccaattatccttccaaaaaggtgttgtgtcaccatgttaacgactaaatttggtaatatatggactaggtttaacattggaatcaaggcggattcggcaaggagatggattcaaagaacagagtatgcatcggctgcgacgacatcggctggagtttgcattggctgagatggatcggacagaggacagccgatagaggtgatgcagccgatttcagtggcgatggcttcggagctgttcgtcgagttatcatatacacgttgcaatctttgttagttacatcatatagcttgttatcggctgattctcattgtcgggaagtgaccgatagtgttatgtttcgttattaagttagattatatcgtgtatctaccatcttttagagattttcatcatcttgcttagatcttatacttatttttatgcttaatgttgcatcggttaagttcgatctattgagttctatctataattgtgatatctagcctgttttatgattatcaagagagatagtatcggggtttcagccgatcttacctgatttagccattttatatcccctgtgcttgattgttatgctaagtctgccctttatattaagatctcatttcattacggtatattaggctttttgtttaatatattctgcttgtcttgatatcttagtatagagtggtatcagagtattagccgatacatgctagatctatctgatcggctatgctataaacatttatataatctttgctttaatatatatttcgacttaagtgatttatactgtctcagcatggcgaccgatctaccccaatcacttggtttaaatatgtatcgaagtaaagattatatattgttaatatctacggccgatcgagtagatttagttttatcttatttactcatgacagccgatcgattccaatgtgacatcggctcaaagataaatgatatgtcatcggcaaccagccgatcggctatcgtttatggatttaactatggttttcttgtttctttttcttgttgattgcataatcaaatcaactggcacgctcacgaacttaaaggcaagattttggacctgcacagaagttaagcagatctttcaggccagtgtgtgtttttcgcatcaacacaccaagaccaactttaaccaaagaaatggctcgaaaaattggagtcaatctgagtacatccttccaccaaaaggatcccttttccacatggcatgcgggggcagaacagagtttgagtaatacttgtcccaaatcaggttaacccatggcagatcctttttattgtagaacttatctagatgcttgagtagaagagctatgttttgtagctccaggttgatgactccaagacctcccttctttttaggctgacacaccaagtcccaagcagccaaggaatgaactttagcattaggatcccttgatttcctccaaagacagtgcattcttgccctgtcaatatgttgaataaccttctttggaagtttaagcgaacatatatagtatgtcggcagggaggaaagtactgagtttaccattgttaagcgctgaccatgattcaggaaggccgctgtggaagggagccttctctcaattctgtctactagaggggcaaaatcaattattctaggtttggttgaacccattggaagaccgagataagtgaaaggcatagagcctatgaaacagccaaaggtgcccgcaagaatttccatattttgctcatccacattgattgggatcatacaagatttatgaaagttaattttcagaccagtggagagggagaagatttgaaggagacctttaagacagaaaatctctttttgatcagctggcaagataatgagggtatcatccgcatactgtataatggggaatttcgcaccaggttgtgggatgggctgagacagaatgccagagtcatgagcagaattgattatagactgcagcagaccagctgccatgacaaaaaggaaaggagagagagggtgaccctgtctgactcctcttttgcatttgaaatcttttcctgggaccccattgagcaggatagaggtggaagctgaggataaaatgtttttagtccagtttacccaaatctcattgaaaccctttgctctcaaaatttgtaggattattacgtggtccaccatatcaaaagatttttcaaagtcgattttaaggatcacaatctcttttttgctttggtggcattgatgaatatactcgaaacaccatgccaaacaatattggatggtcctccctttcatgaaaccatattgatttgggtgaatgacgtacatgatgactgattggaacctatttgtcgtaatcttacatatgaacttaagggaggagttctgtaaagcaattggtctgaagtcatttggtgattcagggttagacttctttgggattaaggtgatgaaagagttgttgaaatttgcaatggatgagccattgatgaaaaattgccttgcaagttcttagaagtctgcagagatgatgtgccagcacttctttaggaacaatccattgaatccgtcagggcctggggctctatcaagaggcatgttcttgatgatattattcatttcttcctcagatggaatggatgtcaaatggtttagatcagtgtctgtatgtagcaagccattcaggttgagatgattttctgacaaaacagcagtgcccattctctgaaaataggtattgaactgggcctgagctttttcttcatgagtggtgactatcctgttgtcgtctaacttcaggtgggaaattttattccttctgtagctgtcagtagcagaggcttgaaaaaaggagggattttcatcaccaaatttaacccacctagcagtatatcgtttcctccaaaactcatttttgtatttcagaagaaccaagatatgattctttagaattgatctaaagttccattcatgaataagaagaggcctttgttcctcgatactgtccaaaaacaccagaacttcattgcaatttgtgattagagtgtgcaaattggatagccttttactccaaaatttcagctttcttttgagattttttagttttccattcaggattactgtctgattagagcttctgacattagtattccatgactgttgaacaagatcttgaaaacctggcatatctacccaaaaattttcaaacctgaagaggttggctctaggaactgaggtttctatgctgattagacatggagcatggtcagatatgtattttgatagagcagtagctgaagtgtttgggaaggctaggttccaggcagtggaggtgaacacccagtctagttgctgtaaaagaggttgatcttgcatattactccaagtgtaagccatacctgtgagggggatttcagtcagacccacattgctaatgatctcattaaaaagcataatatcatttacatctccaccaggaaggtttctatttttaactgatcggatgaagttaaagtctcccatgaaaatccagttctgattcaaatccacttcgaggttatataaccaggaaacaaaattatttcgtaactcacccgcacatgggccatatatatttgtgaggttccaggtttcatgtcgggatgaggttgaaaaaactgcatggttatagcaaaggggagacaagaaattagagtgctagtaaggacactactattccagattatgattaggctacctgaagcaccagaggatggctgaaaaacaaacttgtcaaagcgtctagggcaaaatttttgcaggtaggaatggtcgaacacttcttttttagtctcttggaggcaaataactgaacaagaggattctgcaattttttcagataaagccagccacttgtgggaggagtttattcctctgatattctaacaaaggatgttgcaggatctgttgatattgttattcatgggggtagaactgaaaagagagatttaccgacgcagataactatgaccccgcaccacaaactccactgaacattcagagaaaaccctttcatcaaaccgagtaaaacatcagaagcacaacaggagttatcagtagacaaatagcagcaacaagagttccaaagccatttcacatagcagtagttccataaccacaaataataagggctccagcaaaagagaatagctaccctattacatagcagagtagcaaagctccacagagcttgattattacaaccatttggaaaattcattttttgggctgagagagtttgtcttcagctacttcctcaggaagcagcccacaataatccaccccaatcttctgcagctgttagaacaggaatgggaggggggagccccttgccggcttcaaacttgaatttcttgatgggctgcactttggatttctttttgggcacatcaaaggccaggtccatcttgtcttggcccaggaatcttgggcttctcctaaggtttgcagaggtgattggcacctttggtctggattttcttggcttgggtgtgattggagctggttgagaagcctcatcaataactgaaaactgaagtgctctgacaacagggttatcaatccttgaagtcttttgtctcttggctgggctaggactgtcaccaagagcctggaacaatgaaaggttgactgagatattccagcgagtagagacaagggaccatctttgaaacatggctacagagcggcatagggggctgacatgacagcagaaggggcttaaaatctccatttgctactgccaaacaaaagacctcaggtagcttaatgataggcaaagtaggaattgggagagcatagggaatgatctgctagcccaagtgctgctgctggtccaacagaaatgttgagattgtgccctcagaggaaaaatcatgcactgtgatggagtcttgctgttccccagggataggttccactaacatatcattttcatcctgttgctccctcatatgatcaatctcatgttccagcccattatggttatgcttgatatcatgatttgcattattcccccagttgccttgatgcttatgctcgttgagatgagggtttgggggaatcatttcccagatagttggaaggtcctcatctccaggcagcagatcagtgggctccccctagagaacaaaaacatggaaggtccaggactgaccttggcccccataagccatggcgtcactcataaccagtttacgaggcatatcactgacaatcttatacctggctttcaccaaaaccctcccgagaaccctgtcttgataatgccagtctatgaattccccaaaaggttagtggcttgaacaatgatttgtcgagttttcatatgaagcggaatcccaagaaacattagccaaccttctctagtgaaagggaaattatgccagtttgctaactgatcatgttttacgaaccaagcatggaaccaattacccaagagaacaggctcactagcaactagaacatccctagccagggcggaggagagttgcacaatgcagagagctagtgggtacctttggatcctaacaacatgcatacgatgctaatgctcaataatatttgcaacttcatggatcaactgaccgagaaaatgcacagggggctagggatcagtgactacggcagcaaaattttcatgtgtcctgtgcacagtaccttgaaaggtgaagtcggcccgaggcgagcggccattccaggggatttcgatgttggtgccgtggggaagaaacagctccggccggaactcggcatcagggaggttcgccatgggagatggagaaggaagcaggagatggttttctgtggcggagggagggagatgacactgtttggcaggggaggtagtgggagagagaacggaaggcgaagcgactgaataaggaatgaggtcctttgatttctccgtgaaagtttccgaggcctttttcctccaaaccttcctaacccgcgaaaggcaagagtgggccaaatgtccataattgtggcaggccttacagcggaaggtggatcgacaattggtgctagagagacctgaggaagagcaatctttcatacgatcaaacgaagcaccattagcaagaagcagtctcttgaacactgagggtttgcccacatgatttttgcttttggatctgacaatagaggcataagattgctgaaacccagaaggacgcttgtgcttggaaaccaaggtccattgatttgcttcttctaattgccaagataagaattccttgcgccaattcggaccaccattgctccataagaaaaatctgacatgaaaatccttgccaataaaattacgaagagaatagatatgaagccccacccttttgttgcaaaccaggaaggataaactgttacccttgagatgatgaacctcaaaactgtgaggagtgccaccaaggcaggattaaagagcaatggccaccaatttagtggtgagacgaaaattgaacctcacaaaatcaaccaccaacttgaaaggggtagagcctaagtggggagagaaatgaataggagaactgaaaaaatccagaatttgggattcgagagccttgccatagtcaattccaaccttccgggggagagggagtaaccagagcatcatcgtcccctcccctcccatcaagtttatctcttaaaaaaatagtaagtctagcatcatgttatattttaaaaaccttatccatcggctggtcttgtccattcaacttagtacacattgccgctagttttgctacttctttgatacttatcttcaccttccataacttgaagatctattatttcaaacaactttctttctcggagtagcgacagaaaatgtaaaacaagactatcaccattcatcagttctatatgtgggctagttttttctagtaagcggttctataagaagaacaccaaaactaaaacatcacttttatctgtgttagacaacgtgtataatagtacatgggatctaagtagccaattgttccttgaatgactgtagtcacctcagtttgattaatcgggatgtaccttgaagctccaaagtcaaatatctttactattaaattgtcgtagaaaagtatgttggatgtcttgatatctcttatggaatattggtattgcagtagctgagtgtagatagaccaaagctcaagcgacttcaagaccaatccttactcggtcatcccatgatagagaaactggcccatcagcatgaagatgatgatcaagagatccatttgaaataaactcataattaaccaataatggaacttctatacctcaaggcaaaaacctagaagctttacggtatttcaatgattaacttgagaataaattgcaacttcatttatgaaatcatctatttctctcagcactataatccttggtttcttaatggaaacaacatgcaagtcatgagttttatcaaagtagcaaccaatgatttttcttaaaatatctctctttcatcttctttaccttatgcaactttattttgtatcttatgaaggggacaacaagtgccagaattaattttgtatgtttgcaacataatgtagcacatgtgttttgtttacaaaataatgattgtttcaaataaataaatatataacaactagaggccgattttctagtgtactatactaagtgggggcattggccctcgcacttttctcaaaagtgagagggccaattcccccacttagtatagcacttttctcccttttgtttacgaagaaaataaatagttagtagcaatatatgccttcactagacaatattatgttcgatgccttgatatctctatgaaattttagtgattgtagggtctgaatgtagatagatcaaggctctactgacattaagtgcaatccttatcgggtcatcccatgatatagatattagtccctaataatgtgaagatgatagatccatttaaaacgaattcataaactaacgttgtaacttctgtctcaaggcagcatcccaaaaacttcaccacatttctatgattgacttgagaaaggattacaacttcatttataaaatcatatatttttctctacactacgatccttgattaatttcttaatggcaacaacatctatgtctaatattcctttgtatacaatgtcatgtcctccaccgccaacttcacgagttttatcaaaattacccgatgatttctatagctcctataacgtcaagatcatttttttcaccaatctatatttcatttttttcaacttatgtagttttatatgtgttatgaaaggtgcggcaagtgtcataataaaaatatttacgtcacctctaactcctaatctgatggtgaaaccaaaaaaaaatcataaaataccaaattcaggaatttctataaataaacatgcataaattagcagtatatacaatattgttactcctttcatcatctcataatataaaatgatttcgtgataccacctaccaacttttgcaatagtttatattgaaagtgaatgaaatcgattggagcgagagagaattgagcgatagaaattgtagagtgaatgagcgagaggtctctttattgatcaatgcggtacaatatatatagaaggggaaggggtggcaaccgtagacatgatggttgggaaccatcgcgtccgttgccaaggtgcgccgattgggaaagaaggcgcgattgccttcggttgctatcccatccttttacatggatgaaatcaccaactagttatttcataacactcccccttgatcgaattcactttgatcattgctcatcaagtgttctagatatctgtagagataatcttagaaataattatagttagtatattaaatacatcacgtaaaactcctcaaaaacccagcgggaaaaataaggagaggactgtgatatataattgactacttttagatgtttatgagtaaagctcatagtatgatccaaaaatagtataatgtctacaattatcttgttgagcaaccgggttttgggttttgggccttgtaattgtgttgttcaaaagccagatcgagttgtgtcgcgactccgcccaaatcgactgtttatccatacctatcagaagatcaagacctatcttcttcatcagttggtatcagagtacagttacccattaggtaatttatcgtccctattgacgaaaaaatcgaacacaccggcctaggatatctgcttagctcctgtgcaagtccaaatcttagtgagatgcaggcatgccagtcagtttggtcctgcaactaacaagatatgcaaatagtagatcaaaacagccgatcggctgacaagccgatggagtagttccagccgatagccgataatagccaatgccgataccagccgatagcgatagggttttgtgctatcagctatatgtccaatgtagataatgatataaaggcaaccggctgatgatgatgtaataaaataacaatataatccagtataaaccaatcggcaaataatgatatgataaataagcatcgatccgaaggttaaagcacacatcggctggaggtccgatttcatgaaatccacaagattagattaaacagtgaaacctttgttgtcatcggctaaatccaacttatatgtatatgcaatccttatgagccgatgcaacgtccagataactcgccggctgaaaccccgatgaaaccctaattggcaatcaagaagcaggctaaagattatggttctaggcacgacttagtagatcaaacttaactgatacagcactaagtatgaaaagaaacataatatctagacaatcaagccgttgactgagttttcagggtggtagatgtctaagctaatctaatctagcaacgcgatttagccgataccggcagaaactctaaaacgagaagcagccgatagagctaaattgatatgctaagactagattaacagagacatatgataaataggtaggcaaatatatcatccaaaccagagcaatccaagaggtcgaatgtactgatgcagccttaaacgacgccgacgtagacgatacaattgcctagaccggcgctacattggacttatcccttcgccggaacgtaaaaacaaaagtagaaataaaaagggtagcgatgcgccgaattgtattgatcgtagcgatagattacatagactctgggtgtacatatttatacccatgggttgatacaagtccttgccggacaagaaagaaactttcctaaagataaaaggaaaggataaagtccttataggacactaaacacactttcctaaagataaaaggaaactaataaactattcctaattaatagataacttgccattccgcattctctttgaacttggtctcttctggataagcttcctttagtagatcaatttccttaaccgaatatagcaagaatccgacaactgacgacttgacaactctcatcggctaatctcaggacttcgaagccgatgctgactctaagccgatgactactccgggcttaccaaatttcactgttaacagtcccataaccaaaaaattgccataaaaaatatttattatttacctagacaatttgagccgttgcattgttctattagattttgctatgttgaattctagattgcatcgtcatgtcaatgctagtttagttttagttttagattttgctttgtcgagccaaggagacatagaggagtgattgggaaaggaatcgctgggagggagatgagtgggggcggcagagcgagatgccggagagggagccgatgcgggtgcactcgcacgagagaggtgcaatgcggtggggccggcagagcgagatgcgggggaaggaagatggacgcggatgcagaatggggtgtggatcaattagattagatcgaacggttaggaaaaaaatgatgacgtggaagcaccaggaagcagagaatttctagtagtgggatgatttgtgtagctatataggattaaactcccaaccttattcacagatgcatgcgctgatgccgtcatgcgcagctcagctaactagcttaggctctagctcctttactttccaacgaaaattgctaggaaaggattttcatttcctctcactgtttgaaaccccacacctcagcagaagcatatgttttacgtgggtggcactgagtatatggcctcattgtttggcttttttattttatttttttcatctagtttatattacatcatttgcttttgagtcattgaggacatgtatacaaaatgtttactcacaaatgatctttttttgagattgaaaagaaactaagtagttggaaaggtaaatatatgccagttggggggagactaatgttgattaattatatgtttatgatttctttttttaagatttcaaaatgagttcttcaaaaaaaatgattattatagatcatgcttctttttggcaaggagatgagcacaagaagaagtataggcttactagatgggaaattatttgtcaacccaaacatcaaggtggtcttggagttcataatcttgaaattcaaaatcaatgtcttttgagcaagtggttgtttaggctcataaatgagtagggcatgtggcaggtctattgaaaaggaaatatctttataatcgatccttaagtcatgttgagaagaaacaaggggatttccatttttggtctggtcttatgaaagttaagagcaagtttctaaatatggggtcctgaattgtgaataatggtgtaaaagtgagattttgggaagataaatgggtagtgaattattcttttaaagataggtatccatcgttatatgctatagttcgtaggaggaatgcttcaattgcaaatgttatgtcttctgtcccactgaatgtttcttttaggagaactttagtaggaccgaatttaaacaattggcataatttatgtgtgcttcaattgttcatattcatttttcagaggagaattatatttttagatggaatttccatcaaaatggtgtattctcggttcggtctatgtacttagctttaattaataatggcaacattgagagaaataagattatatggagacttaagatgcctctcaaaattaagatttttatgtggtacctacttgaaagttgcttttctccccctagtgggttttggtgattaatgatgaataaggttaagggactaatgagtttattgagatattcaggtgattagtcccaagaacttaggtgatcaagagatgcttggagaccccctacaacattcattcaagcggatttgaagcccgaaagtcaataggatagtttcatatttgaaatcgagttttaggaaaaaccgtactattaagaggggttccaagtgtggttctgggatataaaaagtaggggtgggcaaaataagaccgaaccgaagaaccgaaccgaaaagaccgagaacgagaccgagaaattcagttagtagttcgatctcagccctcaaaagaccgaatttttttcgggcaattcggttattagcttcggttaaccgaattaaccgaaaaaaccgaatttgtggcccaataggcctaggaggcccaataagcccagtaaattgctaaccatagaaatcacacgcggcgccctcaacccatccatcgcgccgcatcgcatcgcctccgcctccacctcagatccccatccatcgcaccgcctccgcacatcgcgccgcgccgcctctgccggcatccatcgcgccgcgccgcctccagcttgccctcctccgccgcggccccgacgagcactgcctccagccgagctccgccgcggccctgacgggcgccacctccagccgggctccgccgtggccccaaccggcgccgtcgtccgcctccagccaggctcgcctcggcgccgtctccagcttgcccacctccgccgcggccctgacgagcgctgcctccagccgggctccaccgcggccccgacgagcgccgccgcggccacgccaccaacccttgccgccgagccaccgaacgtctccagcaaactcggtctgaccaagaccgaaaccgaaaaaaccgagaccggatttgtcggtcctgagtttttctagatgaaattcggtcctgagttttcaaaaaccgaaatgaccgaatgaccgaagaccgagaccgaatttttcggtcagaccgaacgcccacccctaataaaaagtgctcttagtgggttccaagtggtagaatattttttaggagctatttttggaaatggctctagcccggatagagaaggctggccggaagttccggtccctggacccggaacttccggaccttgcgagttgaaaattttcctaagtgttgtccggaagttccgagtgtcaggaagttccggactccttccagttcaaaaatgtgagtaacggctagatgacgtcacctagccgttatatatatctagatcgcacccagctcaccttttggccatttcacttcatttctttcatgccctaggttcttctagcctctcccaagatccctttgcttcctccactcaaatctagagccattcttgtgagattctgagaatagatgagagtgtaggagtgatttggagaaggtttgaagattaggtttgtttgagcactttggatatcttgtgggctgtcacttgggcttattactcttggagatcttctcctagacggttaggtgtcgcctgcgagcttccaaagatcttgtgaatgtcccgggaaagtttgtgaaggttttcctcacctccgcaaggaaacgaggtaagtgattaaagattcttgtgctgagtttttagaggttctcctaggtagagcaacttgcacttgtggtcttttctagaaggatttgtgagttggatcttggtggtcactcaattctagaaaatgacctaggggtgttgagttgaaggcattggacttcttctgagatctttgcacaagtgaggcaaggggttaatcgagacccggctctttggagcacctcaacggagagtatgattgcaagatccgaacttcaggaaaaaatcgcctttgtcctctctgtgatgattctgtgcatgttgttgtgattgtgtatctgctctgtcttcctgtagtttaattcgtgcaatttagttcaagtcactgttagatcttcaggtttttctgttgctcggaagttccggtggttagaacaccgaaagttccggacagtctgagcagaccggaagttccagtgttctacaccaggaggttccgggcctgctgaattttaccgttgcgatttgtttgtgatttttcggaaagcctattcaccccccccccccctctaggctacatctttgtgcgttaactacttaaaggggttgctctaacaaaggacaacttagttaggagaaattggcatggcagtttgaaatgttgtttttgcatgagaaataagactattcagcatttgtttgtggagtgtcactatgcaaaatttctttggagagctctacaatttactactggtttatatactgctcatagtatacctcatatttttgagaattggctcatgggagttgataaaaaaatctaccaaacttattcttgttggagcatccgctatatgttgggctatatggttgtgtagaaatgatatggtttttgataaatcaccatttatgtcctatatgcaggttcttttcagggcaacatactagctccaatcttgggctcaactactaaagtgtgatgaagaaatcaagtcagtgaaagctgcatgtcgtaatcttgagtcatggttatgcagctattcgctaactttggatggagatccacaaataggattcaataatttttgtgatttttttatgttgtgtgagtttttattagtttgtgtgtgcttttatttattcaggtgtgagtttttattgagttggtgtaatatttgactgtatctctttgagcaaaggccgggattatattccattatctaaaaaatgatctttttttttgttaataagcgattcggataaacatatgaataagcgaaacaatgggacttggttgtacttacatggattgacttcttttataaaagagaagctaataaattatggagcaaatttaagaacccaatgttttatggttgaaattgcacaaacccaatgtattataatgggtggcatatatataacctaagctgttatggtttatggttttaaagttttataaaaccctacccaaccctaaatatttacttcaaattttacaatttgaaacttttagttgtcaacttcttatcaaggttgttggtctaactaaaagaaatttcaataaagatgggttttgtgaaacatttcagatatgccttaaaatatagttttctgtaactccaactataacatacggagttttatgaaatttactatttttttacggggatgaaatttactgattaaccataaaaaaataattataagttaaacgagagtgattatacatgtcttgctcgaaaagatttcgagagttgttcggagccattgtttcgcttattatatttgcaaatgaaaagtaatttataaataaaactttcacatatgtgttcttagcgatctaaaagaaaatgctgaaaaataaacttcagtgagaaaaccttaaaatcatctccaaatttaaggttagaaattcaaattttgactgataggcataatcataagcgaaaagacgagtcccgtttatgacgcaatacaattgaagcagtataacacttgttacgaaacagtaagtgcagcgatttgtataccatgaaccagcatttgaatgtcttcgtatcataatcttatacggcattctatcaatcggtatgaacacttcgtgacatgaaacgctaaggacataaggacatgtttgacagggcttcaactccacctcttttagagctgaaacattaaaaaaaatagagcagggttaaggttgcgtcgcaactctactttggagaaataacacaggcctaaaaatatcctaataggattttctcctgtgggtgaacatgtaatcggacacagctaccattccaaaagtgtatatataacttcccaatgaaattatggccttgtgttgaattccaattggaacaagtttactttaggtccctcaatttgtcgctgagtttgaattgaaccataataccaggtatagcccatctccaaactcgcaaaatcgtgtcaaatttcatcccaaggcagtatagctcccggttccatccgacgtagcattttgactccggttagctgtgttgagtcagcgtgggacccaaacaagctccacatatcattagccaactctttcttcctcatctctctccttctctttgccatcctcaccaggtcaggagtcaggctgcgggcaccatagataggggcagtggtcggcatccggcgatcagtagggagaagggcggttggccgctggtggcatggacagggaggcggtggggtccaccttgagccagcggtaggtgatccaagagaacagtggcgccgccaagcaggcaccccacttccggttgggacgatgttagcgatgtcgtcgccgagggggctagggtttctgacgggaatacatgttacatttcaggagccagaggtttagtagaggaggtggtgtttgtgttgctgctacaggcagaggtcgattctgtgcttgtttgtccgacgtccgtgtcgggccatctcgatcacctcacgccgccttgtgagttgaaattttctctctgtcggccattcatgttttgttttggaatttttgctcgatagttttttgtgatttctgatttccctgtgttagcgatactaattgctttgaccatataactgaatggtgccatcaacatctagttcgtatatgacatttttgtttttgcgctcatgtggtcgcttcaattaagtgaaagcagggatgtgtccttaacaattgtctttcatggcatttctttcctccgaaagcactgcataagaaaaaaaaccaaacttttgtcccatgtgatgtgttagtatattgctgatatggtttgatcgatgtatggcaactcttggcagtgacactaataaatgaataatcaatgtttgaataagatgcacacgcgggtaaggaacggtactgtagttgtatgcagtacttatctcttgtactttggacttgaactaggctggcttcttctggtatcatcacttagtttcatgtccactactattagtcacatggtgcattccgatgtttgttattttcgcaatgtagttttctgagcattgacctagaaattaaacaatccattatcatgtagcgagccctggattttttttacgggtaaaacagcaggagaggctcctactgcacttatattaaaaggaggaaattcacatagagaaactataaggggaaaatataaggggggaaaagaaagaggagactaaggtcccattctttttcctaacaagagttgaattgaagattaagattttcgtggcactcttttcaaactgctaaacggtgcggttcatgtgaaaactttctatatgaaagttactctaaaatatcatattaatctatttttaagtttataataattaaaactcaatcaatcatacgttaatatcacctcgttttgtataaaaaaacttaatctccatcttcatcttcattttcagtaaaaaagaacaccacccatgaatccatgattgccaagatggtttatctgcttcctttactctatgcatatgcagagtaaaattaccctagtttggttctgtaaatgtaaacaaaggagaacccactgctttgagatatgatcatggttgttcttgtcttccctaatgaatctactacacttgtatttgttaggtcggaaagatgaggaagggactacatcctcagatgcagtatatctcatatgtgacttagagtggcaggctgatgaacatcatgatgaccaagatcagccacaccggcaaagtgcaccacatgagagcgaagcatcggatggctcagagcctagggcagattgccaagttcaagcgccgatatgagctggaagcagaggaaaacaatggcaggtagggagaattgcgtgtggaaaataatagtagatgttgttggtggtaggcgtgtagcatgtttccgtgctatcaacataatgtgtgatccccacgtttactttgttatgctttacaccatttcgggttgaagcttgaaatttctgaatttcagttcgccgccttctgctgtaaacaaaattaagaatgtagacattttcctacaatgaaatccatttctactgatacatgatggaatgactattgtactggtgtttggaacccacattttccattcagtgttttggagtatttacaacgctgtggctttagcttgtggcttcaatccccagttatgctcgaatgcttggagtagctcttcaaatgtttatcaatgtgtcttccacaagacacaggtgtgggtgtcataagagagaggtgatccaaaggagagcaaaaatggaagtgagcgctgccatggatctggttcgccctgctgatccaagatgaaagggaattgaggaggatagggctccgttggcggaggttggcaatggagaaaaagagtgccggttgcattttggtatgggaaggagacgtagccggttgtgatgagagcaaaggtctcgctcatgaggtgagaagaggaggggataacgaagaaataagggagaggttttctatgcaaggtttgctttataatttctgtgctaaaacttttagtcagaagtcaaataaaaatatataagaatttgatggaaagtagaagagctgaattacaaaattatgtagggcctatctagagttatccaacattgtaagagttatatctctctacatgattttacctaagtagcgcgcctttttctcgtgagggctacaccacgaaaccactttaattgtaaatattgtatactcttcaatctcaaggcgtatggtccataggcaataaaaatatctacatcaacatccattgaacatattctatctccttgatccatatttctcatgttagtgttaatatactctatctcttttgcaagaagagttaatctatttaatattgtcacttcttttcctagcaatctagcagtgaatatcgtattcttctctttcttcccatgatataagcagggaatgtgaaaacgagctccaccagcaatgttgactcaagcttcgtaccagtaacaacaagccagaccatgaatatatcatctctagtggagtcacgacacgctctttctcaacgagatgtaggaatgaagatgttgctatgcttattgtctcccatgcctatgtcatccatacaacgttacttcacaaggacacatttatgtaatgattgtgacgtatatgttgattctacagttggaagagtggaaccaagctccgtatggtacctacttttttatattagcgtgtggtgttggtactagtgtgttcgttcctcctagtaaaattgacacactagatagatagggtaaggttaatttttatgactccgtcagcatacaagagtggtaccaactatatgaagcaatagttatgtcaatatctacaacaattaattttttttaaagaccataagatgagtccagttgggtcctaccgatgaattgcttcctacaatggtaaagcttaaagctctttttgactgtatgtatacaatgattaaagtatttactgttacaatatttaatgcttagggtttattttatcaatatatattgtggatacctttctgtaaagtctctttcaaaacatttaaattttacaatagtttataattggcttgttcgatgcaactgtttgagctgcattgcatagcccagtcgttcggctgcaacgatctggactattttgaatgcagtcagctgttttatgctggttgcagctcctacagccgttgttggttggctgttgtagccaccatagatgctgcagcagtactagaacagctagctctttcgaacaggccgaataattttataagacgtagattaacctttttatggtaataaaataatacaacaataatttattttccttgattttttttgtgtgtttgggaattgggatatgcaaatctgctcgtggcggactggcggttgccctcgcacatgtcgtggtagtagctgtggccgtggaaaggggaggcaaccgcacaagacgacacgaacgccaccacctgtccccatttcccccaacattccgtcccaatccaatccccccccaacatggccgactccgccgccgccgccgctgggccccaccaccaccaccgcctcccctcctcctcctccgcctcgccgccgccgccgcagccggaccccggcggcaagcgccagcgccgccccagcgtccgcctctccggctccatccccctcccctcccacctcccccaccctcgccgcattcccatcacccccgcctcccgctcccgcaaacccctccacctccaaccccaccaccccaagcccgagcacgaggaagacgacaacgaccacaacccctccaaccccgcctccgccgacgccgacgccgacgacctcgtcctcgccgccgccttcccccgcaagccgaggtccctggaggccgtgcagggagagagcgttgcggccgccgcggcggcggcggaggaggaggaggcggcggctgaaggggaggtggtggacgtggtcgagtggctgtgggggatcgggatggggaggtacgcggcggcgttcgaggcgcacgaggtggacggggaggtgctgccctgcctcaccatggacgacctccgcgacatgggcatcggcgccgtcggggcccgccgcaagctctactgcgccatccagaggctgccccctcctcccgctctgcctccgcctcccccgccgccgccacggaggtgaaaaccgttcttcctgtggtgttggtagtagcttagctcggccctaacttcgtcggaaacttaggatgcgtgggtgtcaccgtgccgaatagatttaggaggtgtaaaaagtgtaaaatagatggggaggaaggtttgatctgtgcttccctgtggaaatggtagtgttggcccaatgcccatggtagtgtcactagtgttgtgtacaaatgcaaagaggtgaaatggaaatgctaactgccctgttttaatgttgtcgaattctctccgtggagtggtagtatttgtgaatgtggaaagatgagatcgaaatggtaactgcaatgcttttgcaagtgtttggagatgcatcttaattggattaggtgaagtagccacatgctttgttattagtggaataacatgatgttgcttggtagtgtgacaaatatgtttagctgtgctgggtgtttatctaatgttttgttgtttgcgattgatcggattagctcctgcaactgcaataatcttgcatgttagtccatatcataatatgccctccaagtagattttgtcattttgctatgcagtttggttcctctcgtaggtgataaacacataaaaaatatgtacaaatgttacatgcaacattgtttctcacaagttgatttgtctttatggcagcaattactatagtgtgtagttgtgtactttcaggtttgctggttccaattttagattgaactagagtatgttgatgtgttttttctgggtaaaattgcttagtgcgctcagattcctcttggttttggaaagtactgttgtgaaggaggtcggtgcccatctgtcactatgcttaccagttcaagctttcttaatcattgaatggcagaagtcaagtttctgtcatattgagatgccaatgcctgaaatcatgtgactttggaatcgaacttacagatgttcagagacattttgaagtaagccacatttgtgcatgtctagttagttaaatattgaattcttcctcatttccttaacccttgttgataaggttttacgtccttgtccatggctcatgtagcgtagatagtaacagctcactggattgctttctttctggtcagtcattatctcatttttcttgcaagttttgctggttcgaaggtcacgttttacaatgctagtgttttgggcttttgggccttttctgtgttttttgctatttccagtaaggagatgccgtcccagttagagattcaaggctatatcctcccacattattgctgcatctgctttatatgcttctgttcttaacatgtcttaaattgttgatgacaaagaacaaatcttcaggactctcagtagttaatttgtttcttttcatgctgtaaatgaagccatatatgctctagtttttttttcacagcaagaacatgagaccagttgcttaagcaatttgagaggtgatccatctgccataaatgaaatcaaagtaattgaattctccagaacaaactcttgcatattcttagttcacttttttgaaatgttcaagtataaggaagaacttaaagcatgtcgttatgattttgaaaactcaagatctctatgctttagtacactcagcaacttcattgatccacctcaagtacattctgcacttttgggttaatcgccttcctgtgtaatgctctttaactcttatttggtattgattggtgtatctgatctttctttgcatgcttttcttgttatctggttttggctgactcgtgaatcataccatttggcttcaatggattattaacccattgtaaccatgtccttatccaaaacaacaagtattatcaacccagagggagtatttctagttcttcaatgtgtttcatagtgacaactagttctattcatgttaaatttacaacaaaatatcctgatgtcaaatgaaagaactaaaatcagtgtttctttactagtctttcattttgttcctagcatgttgtgccttctagcataacatcaggtatgagatcaagaagttctaaatcagttactgctgttaatcttctactaggaacttgaattcgcagccaataggaaaatggaagtttttactacatactttgacgtcaagattggctctcttccatctatgttaattaccaagtttttctgacccctcttattttgattatcacggactaattgtttttatgttgccagacagatgtcagggagccaagccaatgaaatgtaccttcccagtctttgtataagctgcagtttattcaggaaagcatcgtaatgtacagggctagagatagtgttcaacttcaatctagcggagtatacagactacagagcagaagggactgatagtctaaactaattatctcaatttgtagctagtattgccgtatggtccaaaatgtcttaggtttgcctggttgttgcatgaattaccacactcacattagccccagttatgctctctttttcgctttccgtagaagggtttatttaatggacaatttctttcacaccctggcctatatattggtcagtgtgcgcactaactagcaagttggtaccaattcacaccctcaacacatttgtccctcctcatgggctttaatgagatcatctaatctgggctgggatgtcacgtggatggatgcaagggtgtataggtgaaatggaaaatgatagagatggaagtttctgccaattctatttcctagggtattatggtgggaactttagatagcaccagctactcagggtaatggacaatttctttcgcaccctggcctatatattggtcagtgtgcgcactaactagcaagttggtgccaattcacaccctcaacacatgggggaatttgtccctcctcatgggctttaatgagatcatctaatctgggctgggatgtcacatggatggatgcaatgcaagggtgtataggtgaaatggaaaatgacacagatggaagtttctgccaattctgtttcctagggtaatatggtgggaactttagatagcaccagttactcaggggacattatagggatgctcagaaggggatcctaaatgtctgtgctatatatggcaatatagaggcctgcttggctgtactttacaacgctatctgcggctgcgacacagccgtgccaaggagcagttggttgcgacgtaggggctgtaaagtgcagccagataggcgattttatgatgaatctcaagtgattctgggaccaaatatagcatacccttgtacaaaactgtaaaaataatggtatttctctaggttctcattttttttggttgggaatgggatcaatggcagcatcctggatggtatcaatattttgttagaagatattttcttgtacaagattgagggttgctccctgaaggccattcactgttcttagtcatttttgaaggcctacagaaaccaggactgtttgatgctcaatattccaatgtttgtttgaacgtgcagtctactttagatgcagtttgtgcaccatatgaaggtccaatcgaataacaacagataaaggcatgaatatttgatgaaacagaaatatttgcatgcagaaaagaaaaacattttctttgagatatgacatgtagaattttggatgggccttctcctgatatgatgaagggagctatgcacttcaactttctcttgacttgtgtaaagggggagtgcatgcaaatgttgatttatgaactattttactacttagatgtcgtcacatgcccctagcattatatagacattttaatatactattattaattcaattagcttctgacttatttattttgttcatggcactagttgtggcttatatgaaaagacagtggcaaaagtggattgatagtttaaccttatggggccaccttattttagtatgttaatgaatcatttgaagtcagttcaacgtgtgatgcttgaggaagttttctagtatattaatgggaacaccatattattactgaagggcatatcattgtgcctatattgtgctatacttgtgtaagtggattcaggtggtgggcttaaagtgctatgaaatcattagttcatcacagccccttataaaatcattttcttctctgagtacacatgaacatattctttctgggatactgggtgtgcactagtgtcagacccaccacttttatgttatcttaatttacctgggaagttctctttagtttttattatcatcataattgtgagtataataaccaagcaatcaacataaactagccatttcatccttcttttcagatctgaagttgcatagtatatacttgcataactgaattggctctgtcatttccttcactttcaagatggcacgagccatgcagatatgctgtcaaatcaatctgcttttttggttctatgatattcttacggtattaatgtttttttattcctgtagtgaaagccacttggatggaagtatcttgctggtactaccaagttacttttagctggtactagccaatcaattaaaatttcatttttttatccgttatttcatccttttcttttcatcaactgtcggtgaggactatagcaggtgcttctcactagtattggtgctttgtcttctgttaaatgggacctacccccacctgcctcaactttgtcttactcattcctagcatgctacatcaaaggttcttaactatgtttactagagtcagtaagtaccatgtcatagtatatccttgcatcctctatcggtgagacctctgtattggagttgtgtctgctggctaacactactttatttcaaacgatgtttatgttccaacgtatgttggctgcaatttaatgctccatttacttgtttattggggaaaaaaaccttattacccccaaaatataagcacttaaccccttaaatattttttgattcattctaccctttgaatttctaaaaaagactcactttgctccctgatagatttttttaaaaaaaaaattatccttacagaaaatatgttttaattgaaaattttgattgtgccatatataataaacctgtaaaaagataaacagaaaaaaaaaagagaaatatcattagagggtagagtgagtccattttagtagtttatgggtagagtaaaccgaaaaatagtttgcaaggctaaatattcaggcaaaatattttaagggagtaattggggttcttccttatttattagaaaaggtttaattttgcgggtctccatccattaattaactttttcattgttacattttgtttattatattttgacctatctgtagctgtcatagatactctgatctatgcttggttatgcacttatgcttgcttgtattcctctcgtttgtatcttgacttgtgagtaatcgtttgcacttccttgtctttgatgctgacttcgtactgcccatttgcactctctttcattgatcctgacatgctacctgaacactaggatgctgcttcatggcacttccattgtgctacattgcgacatcattaggtcatcgtctgcatttctttttaaatcttttgtaccaaaagtttctttctgttacagatacaaaaagtcctgagcattgtagtaaggctgggtcttatacctttcttttctcccttctcaggtgcaaaaattctatcaacagattaataaatgaacatatgagattctggacttgctgcacttccatatatttggaaaaaggtaagaggaattgcatacggaagcaatgtgattgtaacaaaaataatatattggagttaaataaatatgaaagaattatttctcagggtttttgaagtacacttacatttgggtgttacctataatctagtatccttgggtgtaatgctattctttctcattgaattgtgtggtgaggattagatgttaggggagggaaaaaaaggggggagggggggatcagtgcctgcgtgggctgtgaaaactaattacaatgtgaaaatttgctgtgtctgtctgtcggtgtcctgttctctccaggtgctagctcctgccgtaattcaacgtcatgacctggttcgtgctcagcgagccgggggccggcaaaaccgctgcagcctctgccggcggggtgcgccagatggtgtcgcggacgtgttgcagtgtcatctccggaggaaggcgctgccctcgacaggtaatctctaactgcacataaatccacatatatatcaatgcacttgtactgtgaactctgttgccactgctaccactcttgactgtacaaccagtaataacatattatcaagaaaaagactgaaatgtgtactctgctaaatttctagtttgaaatagttttttgtttttccatgtcaagggaaaataaatgttgatggttcttggtgatatgggctatcaaatttttcattgaatgaattactggcaatgattattgaaataatttcacagctcaatatatgcgcagtttggaacaagtaattcactgttatatcatggtttgttccgctcagacatcagagcaataggaaaagtaagagcctaatttttatatgtatacatataatttgggaaccaggaatattttggcaacttatttccttcaagtttttcaaacatctcaatgtggacgatatcctttactgattcatggatatagccattagccagacagagagtcaagggcagaggagagggaaaagaggaaaaaaaatataggagctaatgagtggggcacacttgtattaagcttagtttgttttattcttagactatatatataatgtcttcgttttaccgttaatttaatagttttgtgtaaactattttgttggtgccgttcaatgcatctggacccagagcaatacagggttgattatccgaatccagtaaggaatccttcaggtcctgaattcctaacactccagttaattcattttattatactaataacaaagttcacacacgcaatgcacgaaagggcttctttgtttactttgaggttggaggattgaaaaggcccaaaagggaagtgcaaatatataacgcagaaatcaagagatgggttagtagtagtgcccaggaagggcactgtcgatctcgattgagatctttgttaggaggccggaacccatccacctaatcctagctgtttatactacaatatctttggcaaatgatgctgccttgtcgcctagtagacgtgtctcttacaaaagggcatgtagcctagtggttacagtgacctgagtggtaccctaaggtcctgagttcaaatcttctatggagcgaattttagattggttgtttctagggctaagttccctatttcaattgccgtatgtatccggttggatgtagaggccgggtaaaaaaaatacccttatctaaaaaaaataataaaaaaaagacgtgtcactcgccctgaaactggtttcaagctttcaatcaaacgttttaggagggaaccagtaaagatggcttagctgcacgcttaggagccatgaatttcacacaattcttgtgcctttctaaggccactttaattcttatgttaatacagtgaaggtgcccccaatttctagaagttattttacgattcttgaagagatcaataaacacacgcataataatcatcttacaaaaatactttggcgactaaaaaatatagtttaatttacaatgggagtatttcacagcaatgtattccgttttatttttagaacacttcaaataacaattaatttgctacaattatatatatgtagcctctcttaccttttcgaattgaattaggtaaagtgcattgcagcagtaccacacctacatgcacgtatatataaagtcatcgagagtgatcaccaggtataagaacgttagggcaccattcaaggtggaaccaataatagatactagtactatatatctcatcagctataataatgatgatgagctaaactaataaagtgaggttaatacacaattataaatgcatgcagagttggcatgcatgcagaaaggtatttgtagtggtggaccaatacatgtatatgtacatttaaacatgctatggttaaatggaagccgccacgcactaattaaaatcgttcatgatcgatcccaactcaactactggccttgtatattttacagacatacttttcagacatgcatgttcaatggcatggaatcaaagattttgaaagtttaccctccttgttaatcaattcaacgaacatgtaaaaaaaactatatctttagaggactgttctcacaattatatactgaattatacacacttttagtgtaaagccttcagatagctgaattgatatgtttgttttttttataaaaaaaaactgaaattatgcttgctaatatatataccacgaaaaaactaatcgctcttgggggaaaaaaaggaaaattgtagatgagctcgctacgtacaggattgtttagttactttaatttaaggccgataacatgacttcgaaacgagaaaatgaagtaggattctacagaaaagagatacatgaacgcgcacattatatgattaacgctatgtccgtttttaaatataaggatttttatagtttatttggagagattaagaatgaagggaagaaaacagtatatgatgccccgctatattaaaataaactcaatctattgtgtacaaattaagcttcagaaaaaaaaaatttggctagtttatgagacaacaatagtacatactccctctgtttcataatataaaactttctagtattgtccacattcatataaatgttaataaatctagacacacatatatattatattcattaaaatctatatgaatttaggcaacgctagaaagtattacgtattacttcctccgtttcataatgtaagttattctaacattttccacattcatattgatgttaacgaatatatatatatatatatatatagtaaatttgtttggtgctccatggtgcccgggcaccattgttgaaattgagtatatacccaattcaaatgagtatgaaactttttcaattacttaggtattaacattaactactttactaactagtttaaagcaagtttgaactgaatttgaacttgtttttgttagattttgattctaggtatatagcatccatacatataattagttaggtatgtaatcatggattgtgaaataaagttaaatttgagttgttttgttgataagtataggtatgaatcaaattattataactaggtatatactcacaatttgaaaattttgaaaaatttgagtaattttgtgcattagataccatggtgcccgggcaccatggtgccccatatgagtgtcctatatatatatatatatatgtgtgtgtgtgtgtgtgtggattcattaacatcaatatgaatgtggaaaatgctaaaaatgacttacattgtgaaacggagtaaggacattgcaaaacggaggaagtaaaacatacggttaatagttagggaccctaaaaaggtatattagggttagttaattatacagtcatatttggaaagggtgcttgtgagataatttgcaagcaatggggcaactaaagaattgagtggcactagaagctggccggtttgtgtgatgttctagctagcggctaacagcgtgcagggtgcacacaacctgtaattaagatattcaagtcctagacatatttatgcatgcttagaaagcaattgtgtatttgcaattttgcactcacatatatagctagatatttgatgtctccaataattttaattgcgtgagtgtgatgtatatcgagctagtacatgcatcatatattctcttaattaagagaagatatttaaaaaatagttaaagaattcctgacatttaattcataagaagctatataactaattattaattacaccatttacagctcataggactgtcaataaaaactcgcaaaatgacaagaaaccaaaaggcactacagattaattaagaaaataattagatgcatataaacttcattttactccaaaatatccaatagtataaatccttataaattacaggtgttaattagtactttttctaaacacaattgttagttgttcaatcatctctctatatatatatatctagcaagctaatacaatacccctacatatactccctccatactcataaaggaagtcgtttaggacaatgtttaagtcaaatcttaggaatatacatcattaataactcttaagtcgatgagtttgaaaatgtaaaaattatatgtatagatttgtcttgaaaatactttcataatagtatacatatatcacttttcaataaatatttttataaaaataagaagtcaaagttatgttttggagaccatgtcgctgtcctaaacgacttcctttataagtatggaggtagtaccagctaattgaattaattgattaatttcctacagggtcgctgccccatgcacagtgtcaccaatgagggaggctgctgtgtcggtggggaatatacaagtactacaacgatctctcatcccatcatttcgctccctacgtaattaaggcagaatgcgacacagcgacgctacttcttcgctaacacactcttaggcgatcgtatagtatcaaaataatactaatatatagggaccatatataattagttgtatatatatggtactaatttcttcgtcaagctataatatagctggctgcgattggtgaacagcgaatcgcggcgtactgtagcatgatgtgtgaggaggaccagctagctagctatatatagctagcacgtccaaggatatgtcaaatttgatggcaaataaatgatgatcacaaattatttgaaacgtagaaaaaaatgcataatattctgattccctaattaattaactgaaattgagttggttccatacgatactatgttatttttactaaacagtactaaataattaaagtaatacgacaagaaagaaaaaatgatccttaattttggaaattcataagacatttcaattttacagtaaaactaaaaataatcatgccacgagctagtcatatatagacaagaggcagccaagtaacatgcaagtatttataattaacaagggcagttagagaatactatcttttttttttattttccctcacttttaagcagcaggtattccatatacgtacgtacaagatacttaagataattttgaaacaaaataattaatacacaaattttgttatagagcattacagacacaatattttcagggaattagtgaaccctatatgtaacaattatatatattgtactccctccgtaaaaaaaaaaccaacctaggacttcgatgggacacaatctagtacaatgaatatggacagatcctaggttggggttttttttggacggagggagtagaggttaaattattctagtcaatggcctgtactttgtggggcctttggatcttttatagtgaggatatattggtgtgtactctataatgtaatataaccttatctggcaacccattagcaggaatagcatgaacatccttgatactactaatattctctgtgaaaacccttattagttaatcaagtttgtaatgtgctcatctttggaatgtaggaatatttcacatgaaattttcaggaatacaacaaaatttggttcatttggaaacttgtgtcaacatgtttcaaaaaatcatgttgggctactacgtggatcgcttttgcatatacgcccacatcgagcttgagaagtcaatagatttgcgagcttataatttgtccaaggcttgacctttgtttaaatattattcagaagtcgagattttttttttgacagccctatagctaacaaaaacactcagtagaataaaatgtcatggtggttggtatacttggtaaccattcatcacctgtcgattgctactgctgaggctttcgagcatggagaattcagtgtacgatcgacgaccaagtgtttttcaaactcaaagatcgacctaacctagctggatcaaggacaagttggtgaattagacgttaattagttgctctcaaatatatatggtcgatcgagatagtcacaataaattaaggacctcgatcccattggctacaccccgtttaccctatctagctacatctttaattgctactatgtactattctcctatacggttttaaaatggattgttttcaataatttttcagttgaattctcaaataaatgtattaattatgcaccaaattggattttttttacttgtagaaatccaattaggtctaatggaccaacaatttcctgacatgtcaaattaagtttgctgctctccgtcgtaaagaatccatttctggctatgcacctgatcgaacaattacttcgtctaagtgcatagctacaaatatggtcttttaatttagggactgagcagatatacgtacacatttctttacttaggtacctttaaattaagttaatccaaaatcaaaatcctcgtttaaattttgtgactacccatgggcgttggtgattagctagacatgcaagtaatagctcggagggagaaacatatatccatgaacatataacaattatattagtatatgctagtgcctgtgatagggacttctcatgctctagctaggactaactaattaaacagtgtttaaaaaatacctgttcaaattcgaaagaacaatatcaaacggctagctaggctagcttgcaaataatgcatctattttttgaaataattaaagggacatgcatgtgtcataaattaaccctttttccttaattgtgatctcgttcgatcttaattatttgtgcttaatttgtcgtatgtgtttgtgcgttttatattctttgaagtcaaaacaccttgaattaactaatatttaatcatctcgaccgggggagaaaactatatttagtggttactccttacatctagctaggtactgtacgagacttcctaatattatagtactagattaattaattaattgagaataagagaacatgtactccctccatactcgaaaggaaatcgtttagaacagcgacacggtcttcaaaacacaactttgacttcttatttctataaaaatatttattgaaaagtgatataggtatacttttatgaaagtatttttcaagataaatctatacgtataatttttatatttctaaactcaacaacttaagagttatttatgatttatattctcaaggtttgacttaaatattatcctaaacgacttcctttataagtatggagggagtatgatctggtgatgatcgatcatgcacgtactcgatcagtaagtaattaatcccactacaataatggagtagccaccaccgaatttcgggcattttgttcatctctttaaaggtgtgtttagttccaaagttttttttttcaaacattcaacttttcatcacatcaaacctttcatacacacaacatttcagttacatcgtcttcaatttcaaccaaattttaaactttgggccaatctaagggggtgtttgggagagaggggctaaactttagcccctctctcaaaaacatactccctccgtcccaaaaaaaaaggcaaaccctaggtttccgtgtccaactttgactgtccgtcttatatgaaatttttttataattcgtattttcattgttgttagatgataaaacatgattaatattttatacgcgacttgtctttttaattttttttataattctttcaaataagacggacggtcaaatgttgggcaccgaaaccagggtttgtcttttttttttggacgaagggagtaagtccctaagggagagacttatgtttttttagcccctctctcccaaacaccccctaagagcaggtacaatagcaggctattagccagctgtaaacatattttaatgagataaaagataagagagatgaacagcgggctatagatctgtagccagctgcagcacggactccaagacacaatgcgtgtatgacaggtgggaccatatattaatagtatagtaagcaactattgtatgaattggctatagatgaattggagctagcagtgggctatactattaaacttgctctaaacacagcctaaaagtaagctagcttagctaggctgtactaccacgcacgcgtgcatgcacgattccaaaagcgttagttaacgtgtgcatcaacccgtaaaaaaaggaacatatagctatagattaatgatagtaacaattaattaatatatataactggtactactgttaattagtacactggtactactgttaatagtactattagttagttgaccctacaaacacaaactatatatgtaccggccccatgatgattaattgtcagcgtgtgttaattaatctggcaagagcatgatataaagaattaccactgtaattgccttagcttaagtaccattatatatttttttttcaacagacatgcatggcgataactacgacatgcatcgtcatcgccatggcacgttgcacaacttgcttgcttgcatgcataaactatagctattgcatatgcaacgatggagagaggtaatatgcactgcttagagcaagttcaatagtatagccaactactatctccaaatcatttatagccactgtaatagtcaattcgtacaatagtcgcttactatacttttaatatctggtcctacctgtcatacatacattacgtcttggagtccatgctgcagctggctacaaatctgtagcccgctgctcttctctctctttctttatctttttaaaatatatttatagctggcttatagcctgctattgtacctgctcttattgctgctgctgctgtttttttttctaaggagggttaatttattttactcggtcggtctttacatccaaccggatatatagagcaggatttggcgctgctgctggtgtgtatatattgtgcgttaggtctgacgtccattcacccgtgaaagctccaacatatatggctgctcatgacttacgtacgcgggcgtcacgcagctcgatcgatctgtccctcgactcacgcacgcgtgcgcgcactcacttaattttaatctggttttatttagtttggtatagattcaggtctcaaatctacgttgggtttgaagtttgcaagtggtttcaaaaattatgtttcatctggaataggaacaaaatgattcatacctaaattatcaatgtaatcatatatccagatctagaattactcagctaaaaataaaatcttggatctagatatgtgccacataagccttaatttccatatatttatatacctatactccctttaaaacttatctagcatttggtgcttaattactattagtgtatataaatactgtacttggatatattgggattttttttgaaaactatattttgttagtaacatagtttttagagaaaatatatcatgaacaatttctatattacacaaggtggtcaaagtggcttatcgaaaacttgacattttgttgctagaaaaatcccttggcaataatggtctcccggctggttgcaatgtgtaattgaacctcccttcttttaatatattgacgtgtaatactttttgtgctttcgaaaaagaaaatgtatgttctaatcaggagaacgttaggctctagtcgtgatcgatctgggcagtggcatggtacgtagggagctagtgcagtgatagttgacagctcgaagtggctaataaagctaggacgtccacttcgtagtgtgtggcctgttgtgtgtggcttactggtttaacttacaacagcgtaccaacgtttgaccttgattacgccaagtgatcactaggtttgtgtcaagttaattcacaattattggatattccttcgatcgtcaaccgtgtattcaagatgaaattatcgatctcaataaaaacgtatgcatgaccttgtcttttcacttttcctcttgctgtttggggcccgatttcctcctagttagcccagtgtgttgtagttgtaaaaatcttttctttcgctaatatattaacgtgtaaaacttttacgtgtttgtacaagaaataatataatcttacttttcttttgcgaggacagttaaacttaatttacagctgataggttatacaccttcagtaaaataatatgattatataaaaaaaccataaacatagttattttagtttctggaataaataattatccgtttaatttttatgtcccacataatacgaatctttttatgtaaaattatgaactaatatatcctatttgtttttttgctaaaattttgtaagtttcatatttcataaaaaataataaactaaaggttttcgatggcaggtaattaagtttattgagtgcatgtgcttagaccaaagaaaatcaagttttgggtacaattacataaaattaaattggagatgaagggccttgagcttattgaggtgttgaataaagttataagcaaccttccaattttaatatacgccttgaacttttagattagggtcgaaatgtttttaataccgataactcacttaaagcgtacgtgatgagctagcggtattattaacatggctaattgcaccttttacaatgtctatcaatatataatataaatcatccaacgtcttcttttataattacacgaaagacgcatacatacaccgcccctagcacacatatcctccaatgtcccttaattttccatactttgctttctttgtagtttgaattttcctcctcttaaatattagagtacaccatctcattaactcgttaagttttgagaaaaaaaaaagagatatatactaccttcgtttttagtagatgacactgtagacttttaggcacacgtttgaccattcgttttattcaaaattttacgtaattacaatttattttattgtaagttgttttattactaaaagtactttaagtataatttatatcctatgcttttgcataaattttttttaataaaacaaatggtcaaacatgtattcaaaagtcaacggtgttatctattaaaaacggagggagtatatatgaatgtgttggaattaatgaatgggccttagcccactcgaagattaattctttggaaaatcacaaaagcccacctcatgggatggcatgcatgtggagtttagtaccaccttgcttattctaggagagggggacctccttaaaagggaggatgccctcctagtcacttgaagcatgtgtggtggagagaagaggggaaacacacgcgcgcgctcgctcgcctcgcctcgcagggcaggcggcgcgcgtgcacgacgtacgcgtcgaatggtccgaaaaattggctcctcacccttgcgcagatgcagcctccttttgcagttttgttttgctgcaaattcggattcgtttttgttttggaaacgttccgaaaaatccggtgcgtgcaaacggcgtggagtccggataagttacgcgcgacttatccggttcggttacgcgcagtagagattgtgcgggcgccctgatcaagcgacctttctctatataaaccgacctgccgtcttcacgcaacacaagcgaaatcaatctagggtttgcctcctactctgtactgcgccgtcgctcgtagactactccatccctctcgccggcgtgcaccggcgatcgggagagcaggtctccggaacctctgccttcgacgtcctgcaccaggagaaggcagcaataaggtttttgggaagcgcttcgcgcgactgctccctgtttgttcacgacggctcgccttcctcttcgctcgcgtgtttcgtgccttcgtagacacctgcgaaaagtttcgaccaagcagccggtctttccgtcacctcggtacgtgttcaatatgatgcgcatatttgatctgttcatgttatactgtgtagtttacatgtatagatctaatgatgcgttcttgctagttttcatctgtaatgtcatgatttatttatggaatagattaaatcattatatgtctataatctcaacagaatgcgtgcttgttaactcgctacaaaaatgcctaagcttgtgtaaatgaatgtacagaatatgaataatccttcaaaagccaagggcagtgtgtctaactaaaggaaaacaggaaagaaggaaaggagacaagaaaaaaaaagatgagagatggcaaagatgaatgggccacctactagaagatgtccaaacataaaacaaagggtctctgtacatgcatggctcaactaccactctagatagatcaatatatgcatagagcattttgaaagtgtgtgtgattaattagcaacgcaggataacgactgaacaataaaacaatcaatacaatttagtagaaagtagtattttgacatttttatgatacatttttaatgtgtaagcatgcacagctaaaacaaaacaaaaatgacgtgtccctttcatgaaaaataatgatgttttgtgtagcctttattctagaggctaactagatagctagggaggagtgctgttaataaatcagaaaaaaatacgttattatattgaaaagatcgttacagaattcatttccttattatcccaagttccatatatcagcttagccaaaacctgaatttaatgcacaagggtatattggtagttaaggtgaacgcaagttaagaaatcaatgaggaagacctatcagggaaattttgacaagtttattttgaatctagataaaagtcgatatagctttaccggtggggactcagttttgtaaatactctaataaaaaaatcgaaaggttgattttattggaaaagtctatatatttaactcttatgtactatgactacgtgtcacatcttttgattccgctgtaaccgatagtatcttgtatgagagacctgttataagtacgtacatctagattttctataatttctatctagttaattaaattgaccggttaagatattgtttttaagagttctgtaagaaaattttagtatgtagcagtgctcgattttattttatgtacaattttttcggtgcaccacatgacagcctttatattgcaactgttattcatggttttcttccggtggtgatcacagatatatctgtaagttcttttttgtcatccactcattttgaagtttgtgtcagaaaagatccagctgttggaattgatgtataaaattttcaattaataggaataagcatataggtctactacaacatatttattaagattacaataagcatgtagtacgtgtgtggccagtgtgtattttgggctccacgactaaaagatgtactatgaattgatctgtgtgcgaaagaaaaaaaagtatatagcatttataattgtgtttaaatatttaataaattaatagatttcaggatttcagaagtattattgcactacatcctttttttgtcctatacactaattaaaaaacgcaattaatgtctgtacaataaaaggtgtatgtatcaagaagaaaaaggtagtagtacaatgtagggttaaggaatcattaactctatttggatttggaatcagatagcacttgctgtaaagattcgtcaagcgctatcataatggcccaattgaactatatttatataacttactgtagacaagtgagttaatttacacaaaatactcctatatataatggtttgtacgtcttgctattaattatccaattttaaatacttggccgagtactcgtaaagtcaagtcgacttatcattttattttctttttcaggagagtttcttgtgctatatattcaattttgtccatagtacaattgaaaaggtagttagttttctgttccagcaaaatacttcttttttttttgcgatcgaatcccatgtcttgtaagttgtatacgacatttaattagtttttgtccttttgcaattggcatccagttgttgtttttgttggagtgatatgcgtaggctgctttgcagtgtgttcgatccatccatctatctctcatgcagcaaccacccatttgcatatgcagcaccgacaatatttgatctactccagtatgcagtgaatagttttgcagcctttcagcacatgatttttaaactggcaggtctctctttttgaccaagtactgagtactatgttctatatgtacacacctaactggatacatcaattttggaaaaacatgtaaaatgcttatatatattttttggaatggagttagtatatgcgagaaacaatatatctatatgcccggttctttttcttaactctaaactttaactttgtcttttttattaacatgcttttcaaactattatatggtgcgtttttgacaaaaaagtttctatgtagaagtagttttaaaaatcaaataaatctatttttaattttataatagttaatacttaattaatcacgtgctaatgagttttctcgtttcacgtgcgcagaaaatatctctcaacggggcataagtgtacatatccgtgtttataaaaaaaatctatatatttaatgggatgggattttcatttaccactgaataaaattatttcttaatattaggaagttgctgtgctaattatatatatagggaatttctatactaactaatagaaaaaaaaagtgctttcatgcgcatgagatcgatgtcggtactgttatagtagcatgtatgcatggctagctacaacatttgttttagaaaattcaccactaactatatagcaaaaaacaaaaataaatatgaacatatatagatgagatgagatgagatcagatcaatgttgctacagtttgtgcatctagcttagattgaaatcaggtccaccacacggccggcttgtcgcaacaaggatgcagaggccattatgatgatcagatctcttgatatctctggcagatatacatttgtgcaatgttggcaattagctacaagctagcaagctagtagtaccatctatcaaagcttctcagtcagctagcttattgggaaggcatatatatgccacaaacaaaagcatacattgtggtatataggatggtgcatgactttcattgcattaggtgagacttggccttttttggggacagtaatatcttcaagtaaactcaatacccctcacacacttcccatcggtttctcgcaaattatatatataggtaccacgcgtgctcttgtccctattccgaataaattgtaggtgtgtcttattttacataggttattttttttaaagagaagataattttaacttaattttatgcaattacatgagtttaaatctgatctaaattttgaacttgggaaatttataggctattttcaccgaatcaggtcagtaaaaatgtattatgcttttcattggtacccctagccggccagcaggatgaggggacatgactatagatatatacatatttggcaattctttggtaagttcatttgaggcaaaacaactgtggaaatgttttcaacttgccatcatgtatgggcaatacatatatatgctgaaccttttttggtgcctttccccaacacagaagctcccaaccaccatatatataaccttaagactgtaaaacagtcaaaatatggtagagacacaagtccatgcccaagacacaactaattaagtaagtgaggtcactaattaattaagtaatggaaactaattaagaaatggaaccttaagcagcaacaaaatcacagagagagagagagagagagagagagagagagacccttaatcatggggggtcacccatgatgtaacacttggacggacacccttcacctacaccaatttgtcacaacaacaacaacaaagacctattggaatcccgacatccaaactactgtccgtagctctaaagctcctttcacctaccaatatttttgcgctctctctgcagcgattataattgatcatctacttaagctagcaacaagctccaaggtaattaattaatataaaacacgccacgaaattttccagatgcatgcactataactatagattagctagctctaggcatgcagtgtaattaagtggctgttgacaataggttagtacaagtagcaaaaccacccttctggcctgcccttatttgtggatgccacttgtcctagaaacttgttctctctagtccatgcacttttctcagttgagttaatattgttgcactacttttcctcttgtttttttttctaaaaaaattactgtatctatctgtatatgctgataccaggaagatatatttatgtatatatatacaggggataatatttaatattatgtgtatataatgtatttctcaccgcaaaacaaattgatgtgcttctccccacaaaacaaaataatgtatttcccccacacaaaaaccaaattaatgtacttccattatggaacttggcagcgacagtctctcacaagaacatgatgatgcatattattttagccgtgtcgggcccgatcgataccacgaaatttttgtatattgcatatatacttttgcatatagctgtagcaactgaaaaacttaatttatatgtgttaatattttcttagaatcttgttaatcctttttatagctcagtggttaaaattgtttgtttctaccaagagccatgaggcccccatgaggccatgacccacagtggggactactaaactaacaaagctaataactctagttaagaaactctcaaaaccgcgacgaatcaaaaacagtaaaccaacggacattgttccacactcattcaaagaaaacaaacatgaaaaaaaaacataaagacaaggcaaaggagtgcaaaaataaaataaaataaaataagcaaggagctaggtatgcatgacatacctgtgaatcatcctcaagactcagcttgttaaccaggtacctcatcactactctaactgtcatcctcccatctctgttaatttggccacaccatgcacacacaacatgtgcgcacacatgcatgcacacacaaacaccccccaagtcaatgtggcatcatcaaaaacatatacaaatatccatcaccaacaagaccaaaaactataaaatcaatcaattaaaactaatttaattacccaagaagttgatcaacaaattaacaagaagatcattagcttttctactgctccctccgtctcaaaatataagcatttttagctatcaatccggacagccaaaagttgttatattttgggatggaggtagtagctactagagaagtagagatgcatgagaaaaattactaacctaaccctcaagaaactccggggaatctgcggcaatggcggctccctcctcctgcaaacatggatcaacggcaaccgcatgaactaaccacccacattgtctctaaaccattcatgaagatcatcgtcgtcggccatggtgtactcactggttctgcgccgcccggagcacgaaccacgtgccggcctcgtgcgccggcggcggcggcgccgccgccaccaccgcccccaccgccgacgccgacgacgaaggccctgggcctgggtggagcaccgacagccgcagctccggtagctgcggatcggccgccgacgttgatgggcctgcggccgcctcatggtgggcgtcggttcttggccgtttccggcgagacgacgacggcgagcccggcgccgacgggccgagcccgagctgcagcgacaggccggcggcgtcggtgccgccgccaccgctgctgctacttgtgctgggctcctggtgggcgacgtcgtcgcgaggcggcggcgccgtgattagctcgggttgctgctgctgcggctgctcctgcggcggcggcggcggaggggcggcggcggtgtccttgctctggcggtgggggtgcgaggggtcctgtgccatggacctcaggaaacaccacgacgacggcggcgatggcggcggcggcggcggcgggtgttggctgctatcgcttcttcttcttcctcttctcgtatcgaagacggtgagctggaggcggcgaacgtcgacggcggccggcccatgggcgtggcggtgcggccggagcaacgtcaccatcctctcatgcctcctcccctcttgtggcgttgcgccgcgccgcggccgacaccacgatgggatgggaggagatcgatcgatcgacgagaggaggaagaagaagaaaaggagaagaatgttcaaaggagaagagtggctttcatatataggtagacaagctcatttaatgcacacactaatcactttttctaatctctctcactctcagtaattaagtggtaatagggtttagagagagaagctggtaagacgtcaacggcgattgcacagtgcccaactttgatccgtggatggaagtgaatggatggatggatgtactacaagacaggaataatttatgggaaaaggggcataatattgtgctgaggtcatcacatgccatgcactatagtgccatttgtgctgtgcccccctctgatcatgactactagctagctagtttatggttaccaacacattctagctatgtgcacatctactggcttgtgtggtttttaatgtatattatcagccacttaattgctcagtaacaccataaagatcaaatatccatgtgagctagaaataaatatatatatataacattgatgtgtgacttcctttattaaaaagaaaacattgatgtgtataaatccggtactccctccggtttcatatttccttagacgtaatcttatttacggaataattcattaaagtacctttgaactcaccttttcttacattggaaataaaaaaatagaatcaacaggaaatataaaaccggaggaagtaaaataaaaacagtgtttttcatccaaccctcgatttgcatcataattttgccactgatatctacatcgacagaaaatatagaaccggatgaagtatacttttcaaaaattttcatatttgtagtgcaactcatctagaacacgagctagaagtcaacacaaatggttcgcggccgtctgcgaaataacacgacatatcacggacgattctgttgctacaaacttcagttattgttactctaatagtggtgctctgctgatggtgggggcacacatggatgagacagtgcttactgctcagggatgatgcatgacgaaatgagttgaccctagataataaacacatagatctagctagctaatatagcaattaattgtagtaaattaattactccctctgattcaaaatacaaggcacaactagatgtttcataatataaggcgtgcatgcatatatgacagtaattaactatgaccttctctctactaaattattgtattttaaatcccccacccttaaaatctctaattatattggatacatggattctatttatcggagtgatccaaacgaggtgatgataataaatatttcttaatctttgagttacgggtggttatgtcttatattttgaaatagaggaaatataagtactataagctaattgaatcaaaaccgtctgcattaattatctctttatttaaaactataagaacaatagacctacaagaaagaacaaaaaggatctaagctacctcttctctcttctccaactaaaataacaaaagaagtggatctaaaccatgcatctccctctcttttctactaaagtaaaatatactccctccatttctttcacttgtatataaaggacatatatagtcatagtccccgattaatgattatatttttttttatttttataataatatatttataaaactataaaaatagaattgcatgaaattattttttaatgaaactaataatatcatatttcacacatcaatatcttaatattttttaaaaatattattagcgagtcaagattttgaggtttaataattaaaaaaaaatacaacctcgctaagatgtaatcttcaaaaataaagtaggccctccaccaaatctcctaaccttagatctacaaaagaatatatggaccaaattaatctcctagctatctgcaagcctgagcttaagcagctcaaaacagctctaacagacaaatcagtggtaggccgggctcctggtctcgagttgtgtaataatgcaagacagttttttttttttttgcttagatctgcatgtgaatcattgctcacagatttgccaaagaaaccatgaataggagtatatattactggtgacgtttagtgcaatatatatatggtaatcgctccatgcctttctcagttgatttcgtagagagaaattatcactgcagagagccacatctgtttatttttagtactcacatttgttcatgtacatccacttctgtccctttgactttccatgtagaagacagaaaataaattataaaaatcaattataaaaaagctgtaaaagaagttcatcggctcagtatagaaaaccatttcctaaaaaacttttaacggtgaaagagatcttttcttcttagaaaccaacttgaatttccctcgcaaaaaaaaaaagaaaccaacttgaattctaggaattacaaaagaaatgttaaaataattagaaatttaaactcaaaaactcaaaaatttaaaatatataaaaatgcaaaaatgttgaatcaacattcaaactcataaataatcacagagaaatgacaaaagaaaactcagtgcggtgaggccaacgagcttatagctatgttgggtcatcaccatcttcaccttgcacttctagggctgaaaacaggacggattcagatgaatacagtttatatcacctcatatcccatattttctaagcggatttagagtgggtgcaccaggtgtgtggatacgggtgtagagcagattgtttcggatgtcatgactggtatggagtcggtgtagaggcacggaaactaattaaaattgttggatgttacatgtatatgcaatcaatacaacatcaaactagcaaaggcagaagcgggaaccaggaggggcgtcgctttgccactaccgtgtgaggtgtcatcttttgctgtgttgtcacaaggtggaggcatgagtcatcgacatgtggatgtttcaactggaggcgcgggatgaatatcaacgcgcatcacttgccactcgcctagtgggtgcagtaaaagcatatcgtcttagcttccatctaccgtcggctgtgggtgtcaacggtgtcgtaagacgaacgggtgagaaattattgaaggaagttgagatggtgagatgagagctaggtttaggggcagagccatattaattggaggcacacctagggatcagttgtattatttttaccctaattctctataaattcaaaaaatttatgcaatttatttggaaattacatggaatcattgtcctaagcctagggcttgagccctagctgccctatgcctagatcctccgcttgctagattaattgatggattaattgggccattcagtttattaatgggctgaggaagtcgaattatccgtcaaacagttcaacggataatctaatcaaaatattggataatgcgcatccagtgtatttttgcaatatatatgccacatccaaacccaatacgcaccatatatactactcctatctgatatgttttcatccctctttttttttatgcatttgagggggaggaagggagggtcgattggagaggataggaggaaaaagaaaaggattgacggctgagattgtcttttaattaatcgaacggctcgggggataggcttcaattcgtgcaacgaaatcgtcctcgaggtttctgttaattgcgcacttatgcttagtttctccttaattttaattgatttgtctcatgtgttttgtttgcttgtgactgcatggatggaacacacgagctgtaattaaccaagttaatgatcaattatcgatcgatgggcctgtgcatcgcattgtacgttcgtacgttgcacctatattgattttgtagttaattatgtgagtgcattgcatatggttattggcattgcttataaaccatatatactgtgggatgaaacacaagtttggaaggtgattggctgctttcgcaacgtcgtagtacgcttcgttttgtcacatcagatgggagtacgtacggtgtgcgtgcgatggtgcccaattaactgggatccacgctatatatatatatatattccttccttcagggtcctcttccttacctgaccatacttttcctttttcgtgccatatatgcgtgcagtatctattcacgtggtatgaaaaatcggacgggataaatccacagggccaacaataattgttggtatatacttcatatcatgaatacatgattgtttttagtgactcggatccactactacagaaacgatttttgcatgtggctatttataaatttcgcaggcgaaataaagatttttgcatggcacccgcaagcgaaaattgttttcttagacaggcatgctaaagccgccttgctctataattatggcaaaacaaataaaaattccaaaaaaactgcaaaaccctagcccgcatttagccactgccacacaacatccccgaaacactagcccgcatcctgaggtcacccacgacacgatgaaggaggacctgaggcgtgctaaggaggatccgctcattgccgccggccgcttccaagtccggcgtcgccggatctgtccttgtgttgttgtcgtcgttgtcgttgccctagccatcgccatcgttgtcttcattgtcttcgttgtcgctaaggccggtggaggtggattcgccgctcccgagtttggcgctactggatctggcctcacgcagcttgccaccgtcatcgtcgttgtcctagctattgccgtcattgtcatcataatcgtcattgtagccgatgccagtggagatggatctgccgctcccaagtctggcaccgctggatccacccatcccgggcccgagggcggcagatctgctgccgcgtggctttgtcgcagccataaccaccgttgtcacggccacggtggaggaaagggagggggaggggatggccgttggaggaggggtaaggagagaagaagagaacagagtggggttgggggggagggaggagaggagatattttaagagagcagagaataaaagagggggaggggatggggcagctgactggatgctagaaaaaaatcatcactaccctaccaagtcaaatagcaaacatcttatgaaacccgaagcatcaagtagagagcataggagatattgctggggctcagcatgccagtcaacttcagcctgagacatgcccgacaaaccactcgaagatggcgaccagatgtgttatacatctcaggagacttgaccaaatcgctggagctctacaacatctcaaatgctctaaactcatactcatgtgaaactagttcctaggacaagcactagcttcacattttcatctaagcaatgataaacagaaataggacataaatagaaaataaaactcagattactactagatatatttacctaggccatccggcctaatatataataatatgtggaagcttgtatacccgttcccacaagcagccgacgggcctcttcacaaatctacctgcgaaaattgattttcgcacgcgatccttgaatcgtcctaggggagaaatttttgtatacgaagatagttatagtccgcctgcaacctagaggtagggatgaaaacggagcggatagtttccatctgctccagacaaaaacggatacaaatacctttcggatcggatatataattctcggatagttcggatacagatacgaataaagatattttctaccggatacggatacagatatggtattgggatttccgtcggatacggataataattcggatatccggtgaacagtgctatttggatatccgtaaaagccatgagacatatcgcatttctttctaactctataaccttcaaaatacctttatagattttaatagtagtttatctcttaacactagtccatactattaatattatttaaattttaaaaaatatttataaattatactttattttatataaaatgagctaattatatatgttgatatttgtttctattagaagttgagttggttttcgtgttccgagaaaaaaatattttcgtattcgtgtccgatcatattcgattcttattcgtattcaagataatccgtatttgtttccgtattcgttttcatatccgataaaaaatataaaaacgaatatggtatgagcattatccgttcgtatccgctccgttttcacccctacctagtgggagttttgactggaaaatcgattctataaaacaaataaatttttattaggatacacttatgaaacataataaatttttaatatcaaagtagttttaagacaaatatatgcatagcattttttaaaaattttccaactaaatatttttgaaatttagtgatgaccaaaatttcacaatcttatgctgctacctttcttttcaatttttgttctctatgttttgtaaggttccacctatgataaaaattccatccttttgtcatgtcagaaattttggttgatacatatataagtgtactaattgagaatctagtggttgataagaataatgagctatagataagggggggaaaaagaaagaaataaccatgcatcttattaattagacgagaccccacaatattactcatcccattaattcaatccacagtaagaaattgatgagatagtacgcatcatgcatcgctataggcggctggagatgcactgcagtgccgatattaggtccttgtctcacgtcgtttcgatcgatccctggcagatgagagactgagagagagcaatctggaatggaactgcaaaactataaaggttttggaacggaatctgcaagcatcctttcagctgatggcccctgcattgcatgcagtagtagcactcgccggccacttgatcatcttcgtgtctgggcaattgtcggtcgtcccaaatttgtgcatcatttctaaatgtgtgtgcatgttgccggcctggagggtgagatttacagagttaccacaaattaaatacatatctactccatctgtctcaaaataaacactacgctggatcaagtcatttgtcgtagataagtggtcactgatacctgtaagagttacctttgaccgcaatcaaaacccgttacatgtaaccttcatatgtgatgggtagttattttaactcgtcattggtgacctttatttgtcatggacatacattttagcccgtcaatggtaacttttatctacgacggatcataattgggacccatcacaaggtgaaaaattgaaaaaataaatataaaaataattttcacctagctagttatagacctttatctgggcatttacaaatcacaaaaatcatcacaatcacattcacattcatctagacacaacaaaatcacccagctacggtggagcttatccaactatttgcccggtggagctccgctccgccgttcgccaccactagatctggtgattcgggctagacatgtgcaccaggcagtctggggcgttcagatctagagacaggcgccgacgttgaccgagttggcggggggaggtggggtcgaggatgctatggagttgtgccccctccacagccatggtcgcctccatcactggttccttaggtggggtgaccaaatccgggcactgcaagctccggaaaggcttgatctaggtgaggccagcccgcgggcggaggcaaagttgacgaccggtgcttggggttgtggagacggtggccggcactcgcggtggagaaggcggcctccagtgcgctcgagctagaagatgtagaggacggattgcaggtggaggcagaggcaatggccggcgcgagcgagtagaggcggagatgatggaggtggagctagggttgcgggcactaggttaagagagtgatgatgcgggggaatcgagagagagggttgataaggcttggttggatggccgaatagataagattaaactcgttaattaccaaatgacgggtaaaaacaaaaaacaatttaagattaatttttttaccattgaacatgttgtatttatcgcccgttacatatgagtgttctcatctctgaccaactgtatttataaacccgtcacatgtgtagggtcatctatgacgggctgacatgtgtgcccgacagatgttacctttgtccagtgcacaaatggacccgtcacagataacccctaacctgtgatgggacttagcccacggtctcatctataacggcctctagtccaacccgttacagatgaggccatccgtggtaaggcagtccaagccatcatagatggtcttgtttgagatgggcaaagcgtagtgaaatcaattttaattttatacatgaatcataatatagtttatctccatatctattatatactaaaagtccattaaacttcctagaaacgctctcaagccgccacgtgacgttcctataaatactcctagaccgccatatggcactgttaaatctcaccatcgattttcatttaaattggtggacccaatactttagactattagattagatgtgttatttttttaaaaaaaaagaatactttcgcatctatactgtgggccggacaaagaaacaaaacgtaagttatctttgtacgtacgtacgtacatacggagaagaaacaatgaatcttatgtcctcttcaacggaagaaaagaaaacatgtaccgacttacgataaaaatgattaataagtaaaaaaaacatacgtaaagcaggtacgtagtgccactgaaaaactcgatgctccataaaatatgatattatactattttaaaataaaatatattactctataaagttatgcaaatatacatagctaaactagatcgtttacaatataaaaataaaatatcctatgaatactctttaaacatcctatctataaattattttaaaatcatatatctaatttgtgatcaagtcggatcctctaattaaataaactattgatgtctatgttcataaatacatcattatatatgaggtcaacatataataaataatgttataataataatcagaaaaataatgaattaccccttaaactattacggtcgaccgaattacccctataaacctaaaaaccggacatctttcaccctcaactattaataccggatgaattacgttccccccctaatgcggagtggtttttcgtcctacgtgtcaatttagttagcattttcttaaaaaatggtaggacccatatatcatatctcttcctcaccccttcatcatctctctctttcttctccctccacatatcaatcagcaaggctaggggcggcaagcggcggaggccactcctcctcagctgactcggcagccacatgcgcattccaatcaaggccgtcgtctccatcatttccgttgcatatcgttgtcgcatgatgagagttgcaggtgccggaggcgagaacctgcgctggtcctcaatggccaggttctgctacacccctgccatctagaacttggccaacaaatacggccgcagctatgtctaccatagcatgtcgtcccaccacggtttttaatcgatccccatcaccaatgcctctctcccgatgagacaacgaggcggatcaatcaagcaagcaagcgtaggggaatagacgaaggaggaggagaagagcggcggggtgacagtgtgcctacccggccggtccagtagcaatgggagggagaagagagaggctggggaatgggattcaggaagagaggcagagaggtgagagaggagaggggtagagagggtacagagtgtcacatatggccccacctattttttttttaaatacagactggactaccatgtagggctaaaattactccaggttgagttttttttggggggaggggtgggttaattcatcttttattaataattgagggtgaaagatgtctggtttcgggtttatggggtaattcagtcgaccgtaatagttagggggtaacttgtacttttcctatttcaaataattttacatcatattctaggtgtcaaataacacttgatgactatataatgctaacttaaagctctatatgtaaaataattgaaaacaacacaatttagttgtgtatttttaagcagatatgatttagttttaatatgtctgagattaagattctcatcttttttttaattgttagaactatttcaatagtatatgataagtgggcaacctaaatgttacataaatgtaaaaaataattatgaaaaatatttcaagccagtgatcttgctataatataaccatttagtccatcataggatttatggtcatatatgtatgtttttctctttgtcaaatagttttgataacaaatgaacaatcaattaacatgcgcaataaactactcatgatatattttttttatagttgaggaattccaacttatcagacataatttgatgaatgtatgtcatgcactctattgatgtgactatgaattatacttcaatcaattagttattataaataagtttgggaaaatagattcattctctaaattaattagtaaaggtatcttatgtgattatgaaaggcgttgaaaaatacgatatgcaaaattatatatatttgtcaaaatataaccaacaatatggtcctttggagattttatcgtggtagtattttaaaaaacactttattcaggtaagaaaatcacatatagtacaaatagaaataaaaaaaactccattattccattattgttttattatcgtgacacatgttgttctcataaattcatgtcattgtcataaatttagggttgtatggtttcatgtaatatgtcataaccagatattaactaaaacatgtttaaaatagagtgaagatctattttgaaaatataatctaaatgtaaacatttataataaaaaaagttaagcaacattaaataagtgtccgcgcatatgcgcgggctatttatatactaaaagtccattaaacttcctacaaacgctctcaagccgccacgtggcgctctaataaattaaagaaaatcctagaaattataagaaaaaaagaaaaacatccaccccttgattttcacttaaattggtgggtccaatattatacaccgttagatgaaattgatcataaaacaaaccaaatactgtggggtcccacctctcctcctcctaccgcgcatgtgtgggtatacgtacgtaacatgtacgtacgcttccttcccttcctcttttttttttcctttttttcttctttttcccatttatataatggatattttttaaatcaccataattttacaaacaaacaaatttaccatcatacaactcacatgtaactaaattagctctacaatttttgaaataaaatttacaccattatatgttaccattaaattaataatgtaatataatttccactaacatatgtactcattattttatactattattttcaaataatgcactattttaaaataaagtttacacatctatattgcgtacctatcaaataaacaatttaagatctatattaactgatttatacgtacacttaaactgatggacccactatttaaatcattcgaactatttttattacattggactattattctcaaataatgcattctttcaaaataaagtctacaacattatatactatatactgtgtacccattaaattaacaatttaaaatctatactcactaatatgcacttacactagaaccactagacccattatttaaatcatttgatatattatttgctaataaataaagcgtccgaaatcgtctttttggcccgctgcacaatgcacgtctgcacctttgccttttgcacgtgtgtaaagcgtcgtgtctgaggcatctaaggtgatcacgactgccgcagcactaccgctatgccacatatcaaatcatatatggagatgattaattttgttaataacatggaaagaaaattaatggtatgatgcagcgagagaagaattaaacactgtgggttgtgttttttccaacatttagctctgtttaagctgaaaccgagagttgattacagaataattataatgtatcgtgttatgtcatatttggattttgtactatttattcatataggtgaaagaaattattatattataaatctgagcacaatattaacgaatatcaagagaactcttacaaagacaagggtgttataagggagtttaagaccctcttttttttctagattccatagttggatttttgtttgcacgctttccaagtttttaaatggtgtcttttttaaaccacattttaactttttagaagtcaatttatttgtttataccctcaaatagctacaacataaatcagataattcatcaatttcagctgtcctaaaccctaagtagtacgtatttttttttcatgcgagtgatggtgatctgtaaattggggatcaacggataatcaaagtcgtaagatgaatatgtaagagctactataaacaactgtaaataggtgtcaaaattaattgctattaattagacatctaatggcttgctagccacacaattaatttctctctacatgcatataaacatgcaggaagctggaacaaatattaccatgtgccccatacatatatattaagctacatgcatataaacatgcagaaagctggaacaaatattaccatgtgccccatacatatatattaagcggttaatattttaattacatgtgttaagtcctttaaaatttattaaaatgctctcaaactgccacgtggtgctctaataaattagagcaaatattagaaattctaagaaaaaaaagcaaagtatccactgcttaattttcacttaaatcgggacatccaatattataaactgttagattaaattaatcttagaacaaactaaatactacaagatcccacctctcgtcccgtggcataggtatgcacctacgtacgtgggtacgtacgcttcctctcccttttttcatttttccctttcttctttttttccatgcatacccttctctctttttcttactatatcatgcgcctttatgggactatttaatcacaagaattttgagtatcttgctctcgcaatttttatttgtggctatactacacggtaggtatgcatatagatggactgtatgataattaactagcaattgtttcttatttactcgagaaaaaaaatgattcaaaagtcgtaagtacttaatccttctcttactcaaaagtttgtgaatggtttttaagataccttaagaaaatagaacccttaaattattataaaataatattatccgaactttagtttgcccttaatttatgagacaaaatttttgaataaacaataatcttatcttttaataatataagtgcccacgcatgcgcgtgggccaccttcctagtttatatataaaagttggcttattttgggatggagagagcacttctcatctattatgatatattttcggtttaacctcaaaaccttaaaatactaatagatgcagaaaataggagaattgacatctaaaaaaaagatatagcagtagatttgtcttccaaatattatatttaatttctttttagtaatttcataatgatacgattagagaaggaaatgaccaaacatgtacataacatactatgtcaaaaattggtcccaaaagccaggaaagattcaaaatcatttacccacacttatggcaagttttagctagaaatgaacttataacctttgatgcagaaccccatttaggacaggtgattgagaaaacatatgaacaggaaaatggtaggcagagtctcaatccattgttccaaataactaaaaagattttctcataaaattcagatcctacaaaattcctttaaatatcctttggtccaaaaggggcctaaacccttgaattccctcaaagctctattttccactctgcagtgcctctgtttctgtagttcttggaggacttttctatggccgcccctacaggtgaaaacttacaattgctctttgttttcaaatgttaattttcttgaaacattggaagataaaaacaaccgaatttcgagccaaatggcatatttcagctataattttgtccaagttcctatttaaattctggaagtggagcattgtccggtacatgcctacatggaatttgcacatttcttaattaactcctttcttgaactgacttatcggaatagagtttccattatctattgcaaataaaaatagttgcatgcattggattacttaatttcatgaatcattgtttgcaatactgatgaacaatgcacatcgattacgtacctaaattggttatttatacattttaatgcacgttttgtatccctgaaaaaaaaagagtgcacgttttgtattattgatcatgataacacatatgcctaactaattcaaggactcattggcttcatgacaattatcagcaaagtatcatttgaaaaagaaaaaaaaaagaggaaaaaacgagtagtcaacttactagtgcatgccatggggaagtccactatgctgtacagagagaataatgccagctatttttgcctgcacagctgaattttgcaagcttctgttgtgtcacagctgatagcctactacctaattattcagggttatgtacttcgaattttttgaccttgtgctaatcttcgggttttcctagtggaacgctctgttccttgtcaaatgtttgctgataatgacgttagtacaactttgaattggttgggtttttctgaccatttggtcaaagttttttttttcctgcaatttgggtagttctttcagtgtcagtacttttggtgatgtctccatgttgtttcttatttaccaacttggatccttttgtcagagtttttctgtttaccattatatgctctaaagaattttaaattcagaaaattgcgctgttttttctaatttcattcaaaagcaggatcatatgagtgatgctttatgacttatatatgtaatctgatttttttttttttgagagctcatattttgccaacagtttcattcagtcaattattgtgatacatgcgtaagatgttcagttatacaggttcaagatccctttgaggcagagaatgtatttcatcaattactttcttgactctttggagtacagtaaaccattatagggatgcttgtctgtcattgaatttataaaaaaaaagatcctttgatgcactcagtgggtgagagatactcatcggctgtagatggtggtgttttggtgtctgtttgatactgttggtacccctttactctttcttgttttgtttggatgttgaatgacataatgtgattgcttcactacggttagttaggtgacaccaatgtatcaaactatttgggtgtcatccttcaaacatttaatttttctctgataggcaatccaaaactgttcaagaaagaaagtatcaatcagagaatatttgcctcaataacttggcccattaaatgaaaatgcattaggcttgaaagacaatttattatatgaaaggaagtacatagatactttttatgaggcggtaggatggtcagggtaaatgtttatgtatttttcccatgaacagaatagattgtttcgtatgttctgttgccagctttgtttccaacttatatatctctgtacatgaatatgtctcttgatttgtttctttagataatggacatttcattaagtaactacatgtctctcgatgcctatacctactgagtgccatttgattcagtgggaagatatttttgcagctgcaattgtcagttgtttcagaaaccagaactagattatccattgaaaacttcagagtaacctcatgatccttcaataatttaatagtggcatctgaaatctatgacttgtttacaggaaataatctgttacccacttgcaatgcttcaagtaaacgtgaacaactggttcttgagcatttacctaactaactgtgttgaggtaaccatgcagaagtgcagaaactgttcataatctagtttttcagaccctgcatgaaagtgactcggtgatattaatgccgtatagttttggaaaacctgtttaaggaagtgcttaaatgttgttggtacttgttagtgatgccttttggttacagttagtgttttttttaatcaaaattgttgaccctggccctcttggtttgctatctgtcaatctcactgctgggcttaatttgacatgaactgatggtcaatttatagtgtagctcttaaatttaacatgggtatgataccatatatgtatacttgatttgtagtgcctctcaatgttatgagtagagcgttcttagctgatcaattttgtagatgctcttctcaatctcacagtgcaattaccatgaccctaattgattacctgaaatgcattctctgtagtgttgccaaaatgaaaccatataataatctgtccttcctaccatgcatatgcttcacaccttgctgcagaaatgttgttttctcccatgtcacattcctgatgcacttgcacgggtacctgacaacccttgaagacatttcagccattttcaggttaatttccagtcaatagcaccattaagcctgaccgtcctatcaggtacatgtccttctccttgctgcatccccagctgcacctggagtgctgcattggggaatctgagaatgtcttgtgccttaaattaacaccatatcatccatcggtgcgaagtcgatcgtcacgaaggcgtgatcagcgatcgtacctttgatgatgggtgcccaagtactggtttctgtacatgttcttggaggtggagatggtggttgaaatctctcagagagaggcacactcccacacacctcatggcagcatgtcacctgttcatctctctttcaggaacatcttgttctacatacttacattgctcaattttgagcgattcgatctaatatgcggttttcgctttcggagaaggcgtccattttcgatgatcataccttcttctcctcttgcagctgctgggtgccttgacttgctaggaaatagtttgcagctccttttccatggatgctgacctcctactgtcccttagctgcattccctttccatgatgatgacatgctacttgaacacttttcatcagagtatcagattctgctgcaaggtgcttccctctctgtgtgccaccttgcagcaacattaggtcactcacccccagtgcataaaatctatatgatcttgcaaattgtgttttcctttttgagttcaatgtctctcagacaagttaggctggatcggtgttatttaccttatctttctttgggtaaggaaaggaagaactttgaagccaagacagggtaatatagagtagtaggaaagtggagctgttgcatctccaaacaattggaacttgtgtttctactttgccggcatgaaagcaatttttaagcaagtttatcatgaatgccccggcattgcaaacatggaccttttttttatctaacaaactcggtgaactttttttttcggagcttcgaaaatggttgagtggtatggttcaaataagagtaaaaaacaatcaaatcttgggatttcattttttttccaataaaacccagtaaaagaaggtgcaatggaatttcagtagaaggatgcaagaaagagaaagttctacagggtgcagaatataggcttcctgctagtagctgctgcacacaatgtcatgggactgttcatgtgcttggttcatcagggaaaatgataagacatctgcaccaattattgtgagtgcctatctaactttgcatgttcctgtttacattttaaaatttctttcttcatttttcatggaaaaaacaacagcctaatcaatgcctgaagtctgaactctgttcttctctacgttattactgtttcaacaggatggcacagtgttattgatggtaacggttttctctatctgttaatctgacctgctacataattgtcatcatttttcttaaatctcctccattctggcaccatcaaaccaaaatctctttaggagaaaaaaaccaatccaaaagcaaaagttaatttgaaaagaaacaaatatgaaaaacaatatgttactacacatcaaaggacaactaaaattgtgtgcatgaagacgtaggtagatattgtgtcatactgtcataagcaaaggctcaaccaaacgccactagatagataggagcatcatcaacttcacctaacaaagaggcaacagtatcaccggtggagatgatggatgatgagtagtagtagacaggcagccttccaatggctaatgcacacaattatagcataattaacacaccaaaagagccatgattaacctagagaggaatcatttggtaattggaggagagggctcatgaggaaatatgcccaagttttcctttacttcctctcttttctccagaaaaatatatggtgtgatttctccttttttgttatttatatgtgatgcatagaccaagaacaaaaataaagggtaatgttatacagatttttctttgcaaaatatttttcaaatataaatgttaagtaccattgtatttctattacattgaagacacattgcatatggtgcccaatttttatgcatttgagtacctgatggagactacaaatacaaaacatacacccacgatgttctagtaattttgccagatctttctaaatattttttttgaaaagtatactatctcagtatttcttttcgacaaaaacattttttccataccatcacaaaatgcagtttgggtaggcctagatgaagaaggtttcttattcaacagtatcggattataggatataaggggtttaatttcattttttttataaaagatttatataaaaaagtggtgttttagatggtacctaattctgaggcattgagtacttgggatgcaagggtacaagtacaaaatgtgtaagacacatgaggccggagaaagtggttgtgaacttgtgatgggatgttcgttaaaacttaaaagttgtgtcgccttaatatttatttatttagcacttcattgagggcatttcttaatgttaattattcgcatagtctcacgtgctgcttacataaataatatagtccttattaagggaatggggaatgatattgatatatgtgagatgtcattagctaagctattaaatacagggacttggttcctctccaaaaatatatatatacagcgacattgctgccgaaatactaatcatgaaattatatttcattgctttaatcacgtgttttcagcttataaacaacagcaaaggaactcaaccatattataagagagttactccctctatctcaaaataaattgagttcgaaatttgtttcaaaagcttaagtccgtaaattaagaaattttatccattcagtatcctttactcatacatcgatactacttttactttgccttttttacaccactcattttttcttgggatgtaatggttcgatttattttgggactgagcgagtatctctgaatcaaaatgttcatcttagtgtaaattggattgcccaacttctttatgtatattaaggggacatggtttctctagtatatatactccgatagttctattttacttattgtttagatattaacaaagtcttcattagacattgttcactactacatttacaatattattaaaatgctatacaaaagtacttttatcatgaactactaattactctgtgccgctgcacttaatttaactgttgtgcagccaatacaaacagtgtgttgtgtctgcagctacagcggctacggctgcgtgcagcggctgccctgaccagccgaaaatgcccaatatatgtttatagattaactgtgatatttgtttgtatgcatgcattctaaatctcaattagtttttttttttgctaaaacgaattgcacataatgtacaaacctcatgttgttgcactctaagcatgtattagtcttcaattggccgccgacaggcaggcatcaaatcgtgaaccggaggatgtttggtgaagcgtacggcatcaggaccatgaacactttggaacggagctgcctagtaaatactaaacaaaacaaaataagtttagggagtattagcatgtagacgtctattaaaaaggacttttaaatttggtttctaaagagaagaaacaaacaaagggtcgacgcagaaaaggacattaccgtgacggctattgttgtattttaaatttgattgaattcagtggttttactttctttgcagaaaggatgttgctcattagctccttgattaatggacatctaaggcctcttatatggttaacaaatcacatcagcccaaaagtagtgtagaaccatcgatcgtatatagcaggccaaatggccaatatatatatggaaaagtagaccattttacaccctaactaactaactataactatatatatatatatatatatatatatatatatatatatatatatatatatatatatatatatatatatatatgtgtgtgtgtgtgtatatagttattcagcacataaaaaaatatcgaaaaacgtaggcattagggaggcttttttctttttgcgagtgcagcttataagccaagaacacttgatcaaagcaaacggaaaaccagttttagactaagattttcatactttttctcttggaagtctagcatgagctgagcgacagaaaaaaaactaaattaattctaaaattaagttttagaattgaaatttcaaattgtttgatgtcatttcctttcaactccttggtgtagaatcattaggtttattgtgtattccatatagtagaaaaatttattctaaatcccccaaaaaatgcacatgataattttatacatgactgtattttgcttaggcctcttctaggttgtagcactggcctgttgattaattctggcgagccaggcccaacgttttagaaagccggtattgcagagatactggccttggcctgaatttatcaaacataagttcatatatcaaatatctaggcctaacaaaatgtagctaattttaaattgaaatttaatatatttctacctatttattttgggttcaaacgacaccagccaaattaccagttcaccaccgttttttttttaacctaggctaggacttgcaagcatcagtcaggaaggtctgggatcaagaggtaaacagagcagactatgatttgtacaaataaataaataaaaaaagacctccctaggacaaagaaacagatcagactgtgtgttcgcacctcctggttgggaacacttccctccattaggaaaaacggagcatgccattagcacgtcattaattaagtattagtttttttaaaaaaaatagattaatatgatttttttaaaacaactttcgtatagaaactttttccaaaaaacacacgtttagtagtttaaaaagcgtgcgcgaggaaaacgaggaagatgggttgggaaaactgtgataagaacacaacagaaccgaaagcttgtcaatttctgaacaactccctgccactttcattatactgacactccagcatgtttgaaagatccaggttttaaaatatttaaatggctataaataaaatattgttataaaaaggttaaataataaaaacaatcaaccagaccagggtggacgaaattgtgcaaaaaaatatctttgagatcagttttagaatataatgagattattttataacttgtaagtcactcaatgcttctaggaatctgctctactcatatttttaagacgtggagagaattgattcaacatgatcatgtgcaaatacattgaaatgtgtcatgatttatcagtaagatagttaggctaatacaatttcaaaactaaaattacaatgataagattttaaaatgcataaatattcctctattccaaaatataaggatttctgagttttatatcttgtttaaaaaaaaaaaggtttctaccactattcacagtactacttgtcccatcaatcatttctccaaatttctcccatcttacccctacctaccctctcacctccattatttttgtttttattgagagacaccgaagtcttttctccttaattttaatctttgataaacatcctagaaatgtttatattttcaatggagggagtagcttataaagaacaaatgcatagactaatctacatttgaccaatatgtgctgtaaattcagggaccacaagaccataatcttcagttcatgttcagtactgcgtacctaatgaatcattcccagtttcttctgctgtaattgaactatttattgcgaaatatgttcccgcgccccaaacaccaaatggacccagcaaggaaaactcatccatgattcctgcaagaatgcagggttgtgcacccatccaagactgcagatgaaaaagagtaattcagcaaagagtcactgtcagatcaccaaagttgtagaaaatgcagcattgagatttttgccaggctgaaggattggctcaccaaattttattaagaggaaaaggagggttacaagtgtttgcaagatcgacattaagctgtcgaggtggggtgacaactgcaccggtattagccccccaaaaaagacaaagacattgcaggggtttcaattaatcacactctcaaaaaattcatgcttccttccaaatgatgatttcctctcttatatcgttgtaatgcagcactgggatctcctaagccttgcctggctgcatgcttaccttgtgtacaggaaagaatgaaggttagcagatcgtcgaaccaacacaaatggttacaacttacaaagacatcttatcctgatcgtttcgaagactcaggcacattggtcttcagggctgaagggttctctgttgaaactaagatccggtacaatcttacaatgttgtgtcgtccaacagcacccatattactacatcagaataaacgtatgattcaagaaagcaaacatggtatttctgaagaaccaaaacaaataagtgtatgtgtgattctttttaaaacttatcaggttaatctaggaacaaaatagaggaaatgtacatgttaggttagaatctagaactgctgagtcaaaagttctcaccttaattaagtttaaactgaatgcaaattgacaagtttgatatcccaagatgatgaatttactactagtagatatgaaatgaaaactgctgcatacatgtatggcaactcaaccagctagtatggggaatgggtatgatcattgctggaaaatatatggcagctcgttatgtaccaagcagagaagttgacgagataccttcagcttcaaagaaactagcttgctagcaagacccatctctttctattctgaagtattgagacattcaaatggtctgacatgcaactgttgctgcatgtgctcttaggagaatatcatcaatcaaccattctgatgcccatcaatagggtaatttccatgcacaaataaaacaatcatccggcttagaaaccattaattcacaaagaaaaccattgaaggttttgctcatgcctagctatgtggaaagactgaatgcagaagccacctcttgtcgctagcagtttggtgatgaatacaaacaaaatattagggaacagaaaatagagaaaaagggaaaaacggttcgatacataggttctataagctggttccagcagtagtaattaactagtccaactttccaacatcagtatatgtcattctgttgacagcccaagtcttaggtaagtattcagcactcgtgacttggcagatccagatgcagccactccttattctagactctctctttttttttttttttggaactagaaaagcatcgcactccttattctagactagtccaacaacaatttattgggggaattaccacctgatctatgcagtggatttcagcttcagaaattgctggtgagaaataactacttgttgggaatgcttctgccatgtccaaaattggcgtatgcttggatagggcaaaaccacttctctggtgacattgcacaggcgattcgaatcaatttacagggatgcttcctcaggagttctgtcaattggttttactgaacttcttggatctatcaagcaatcagatctatggggacctccctacttgctggtcaaatcttcaacaattgtttttcctagatttgtcaagcaatgctttctctggcaaagtcccaacctcaacaagcaaaagtcttcccatctgcaagaacttaacaatggtagatctccgggacaataggctatctgctgaaatttcttcaaggatatgggaaagcttgccttctcttaaaattcttcagttatgctcaaatatgttcgaaggatacataccctggcaactatcaaatcattctcaactgcagctacttgatctagctgacaatcaattggtaggttcaaccagcacacagcacattttgctaacttcagatcaatgatgcaacagaacaaaaggctcaacattggatcaacatatgttgcgttcacatattcaaattactttttgtccccatattctaacagaattgaactaatttggaagagcagatcttatacatttgaaagcacaattccacttctggcagttattgatttacaagcaacattttttcttatgagatacctgcagagtttgcaaaccttaagggtctccagttcctaaaattatcaagaaataatatatctggcagtatcccaaatgatattggcaatatgaatgccctagagtccctggatttatcttgcaatgcattttcaggtcatattacgaccaacatctctagcttaacatttctcagctccttacatctctctaataaccacctgtcactctgtcaggaagggcacccacaggtggccagcttgagacactgaacgatccatcaatttacagcaacgattatgggctttgtggaactgtgttgagtgcatgcccaattgaaagttccagatttggatctgaaccaaataaggatgaatttaggtctttactaagccacaatcatagggattgttattggattttggctatggtttgactcactattcttcattgatttatggaggattgcagttctaacctgcattgattatgtgcagaataagattatgcaaagaattcggtgcattggcatcgattgtggtattaacaatgtcggaacgtaagaggatttctggtagtctaattccgtacggtggttatcatatctgtctacactgaaaaacaattatgaaaccatagcagaaccaaagtaactgtgtggcaaaatacaaccacaacatccttatattagatagaattagatttatagggcaactctaatgcttataatacttttacagcccgatgtttcttttaacaatgtcatggatgattcacaataatgtttcatgtcaatgatgtttcttctaggtagagctctcctacctagatcatccccctcttgtctactctactccacaagttttgtagcagtacatcctagtgcaaacattataaacatcgacctatttctctaacatagtttaattcaatcaagccggtgcgctaataccacagtatactctggaccccatagcaaccataaacagaaaatatagtatagctgaaatgaggcaaaagcggcaacttcatataaaaagttcaaaagggagcacctcattatttgggtatccaccagatgacaaatcatcagaaaatgtgcaagagaatagaatcagttaccaatccactttacacatgtttatagcttaatgatagtccacatcaaaacgcaattacatgaagcacacacaagcgacatctgcatagctatggggattgtggacaccttgccagttaccaccatgaaaatctcatctgaaccatgctcaaagcatcgcattatttcgtgaaattagtgaacatgcagttggtcattggttcaaacatttctactcaatgcctagaagtttgaagggatcgaacaaaacctcaacagcaaagaacatgagcaaatcctcctaaacacgcagcatccttaagattcctaatcgtccccaaacgaaaccacataacactaaaagcgtaaatgaaatgccattgttcaccaatccggagatcggcctacctaccacgggtagattggggtagagcggacgccggagaagcgcctccgccgcgggccgcaccaactacaacgccgccgccgccgccgccccatgaatgcggccgggacgccggagaggaggacgggctcggcgcgtgggcttggtagtcgggccgggcccagggaaaggggagatctgggccacgagtctgtggcctgtagggccacgggcccacggtgccatctggcaagcccttgtataaccattttaaaaaaagtaggggcaaaaataaaaaccagaaaacagaggtaaaatcaatattagatatgaaattacccctatttcattttatttgaagatgtttaattaggggcacctcataatttggttcataggatcacaagcacattggcccatggtaccaccattttttttttcaaatttgatatttgaatcaaaaagtagtagagagtatatattgacagcggaccacggctacgttggtagcatatcgaacacccatgtatcaatggaaggtagaagcctgtctcaaaaatatataaaatagctaatctatctgtatttataatactactctcatatttcaacacaatcttacatacttcattccttagtcaggatcatgtcgctgagatccaatgttcgagatcgctcccccctccgccttgcactataaccgcatcatcccgcctcctatcttcctcatgattctcctcccctttccttccaattttccgtgctgtcacccacaaactgcgacgatctaattgtatcaagatttaacctcccatttatatgacctcgtgcaccgtcgtggcagggacctctattgtctactgcacatccgcggtggcatcaaccaactcctctgccgcagccgcctccaaattttctagttttcgttatttgtaaatagtattgttatatggatactaaactattctttcaatactcttattttttttaattccgatgtttagttatttataaattgtatcatatatggagactctttttccaatattcttttcttaattatggattaccgttatttctaaattgtattcttacaagaactttagactcttcccccaattttcccttttttttctttaattttgaattttacttatttgtaaatttttattgctatatggattctagactatttttctacttttagtttttcttttttctttagttcctagtttcaattagttctaaattcctatatggactctaaactcttcttccaatattcatttcttaattctgaattttgttatttctaattgtatttctatatggagtctaaactcatctttcaatattctttatttttctaattccaaatttcagttttatataaattgtattcctatatggactctagcctcttcttccattgttctatgttttgctattttatattgtatttctatatggattctaaactctaattttttctttattttgaattagttctatattccagtttagactcttcttacaatattccttacttgttaatttcggatttctattatttttaaattgtattcttctttcaatagttcatattttttaattcatatttcagttatttataaattgtattctttatggactatatactccttcttccaatattccttattattttagtttctaatttaagttatttataaattgtatttctatatgtactttaatgtccacttctatttttcttattttttaattttgattttcaattagttctagattgtatgcctcttttaatatttcttatttttaattcttaatttctattattttaaaattgtatttctatatggactctatttttatttttttctccgattaatataaaaaattctagaccatgagaacgaacgtagaagctcctttttctaagactttaaataagttaatggatatttcaagaattaatttaacctctcctctttaatttcatatttctaaaatattagttaatatatgatacaacatagattatttgttgcttgttttgcaagatctacctagtattttttttctgatcgtttgcttatttatctagaagacggataatattgtcaccccttatgatctgtttgctcgctaatttgaaatgaataaataagctacatacggtgtagctacccgcctaactttgttattatcaattatcatatactccctctattctaaattctaaattgatcatcatatatttttatacaccaagaccaagtataatttaaattgcatcaatcaagacatcatgcatatattctcccacaatacatgcatcgattaaaacaccatgccaattactccctccaatttcaaattagttgacgcttggagcttggaccctttggataataaaacttgacgttttagcctccatgtgattaatttagtctgatctacctctgcatggctgcatgcacgcatcgagtcctgcacaaaacagtaagagcaagtttaatagtatagccagctattagctccaattcatctatagctaaactagtaactcattcatacaatagttacatactacactattaatacttggtcccacttatcatacgcacactgtgtcttgtaatccgtgctacagttggctacaaatctatagcccactactcttctctctcctcatttatctccttaaaatatgtttacagccggcttatagcatgctattgtacttgctattagaagatgctttgggactagcagccaaccactaggttaagaggatgtgcttgttagatgtgccatcctaatgtatttaatatgggtaaaacataaatatgcaccctaactaaccatttcttggtatgtgagatattgtctaaaacgtaaattaatttgaaactggagggagtacaccttagcatgcacccaatgctacattaattgtatccgtatccgtgcggttatatgatgatcaatttgagaaattttagatttcattatatgatgatcaatttgggaataacgagtatatttttctgatcattgatatgataagtgagtacctctagaaaatcacatgtatttttacgctatttttcataagtcccctgtatgacgtcgttgattttttaaccaatatttgaccattcgttttattaaaaaaaatatgttattatcgtttattttgttgtgacttgatttatcatcaaatgttccatgtcataaatattttttatatttgcaaaacaaaattgaataagacacatagtcaaatattattaaaaagtcaatggggtcatacattaaaaatacggagggagtactcgttaaaattctggcttcgtcactggttgctactaagtagtaccgccttaagagcagatacaatagcaggctataaaccagctataaacatattttaaagagataaaagaagagagaagagcagcggactacagatatgtagccagctgcagcacggacttcaagacgtaatgtgtgtatgacaggtgggactaagtataatagtatagtaagcaactattgtatgaattgactattacattggctatagatgatttgtagctagtagtgggctatactattaaacttgctctaagtgcaacacaagggacaaaggtttccactaaatccagagaacctcgtacgccatcggcgttcgtctatctacataggagctggttaattagtcgccggccgaccgacacggccataaattccgtcggatcgtcggagatcgaccaccgtgccatcccatcccaaccccctcgatcgctgctgctgcgaaattgaatgatccgccgccgttaatggcgccattaactgcaaacgccgtatagtagcagcagcagcagcagcagagcacagtgcaggaacaatgccgggaacagcaacaacctaggagcagcagcagcagagcaacttgtactagtagctactacaagtggtaatactactggagtaggagtagtagtagcagcagcagcagcagcagcattgaacacggtcactcgcgccccgtgtacgtaagttgtagtactactctcgttaccacgtcggcacgtcagggtacgaagaggagaagaagaacaggatcaaatgtgagtgatcttatatgattccgtaacggagcggagctagaacaaaattaaaaaaaaatactacttgcttaatttactttattttaaacttacgtgagtgtgtctataaatttataagtttgtatttagagaatatacacatgataaaaatagatgagctatatataaaagctcttatacttgctgattctatttctaccctacaggtatatgtacagcttctctctctgccccttgccgtcgccgactactatacttgctgctacggctctgctggatggttaaaaatagtgatgaagtacttcttcatacccaatggctgtgtaaaaatgggtgtgtatgccaaatgatttggtcgagttacacccttcgtcctaaaaatgatttggtcgaatgctatccaaaaatcctacttcctccgtctaataatatggtagcaatttagtactgaacgagacacatattaatattatgaatctagacaatattaagatgaatcacattcagtactattagtttttatattttgggatgaagttagtattaaatatttttagattggcttaaaatgtaagagtttgcaaggattttaacatgagatccaccctcttaggaaaaaaaatgtgtctatatacatcttccaagtccaggttcacccaaactgttatttatgcaggtttcctgtgttttttcaaattcatcctttttcaattcataggatttaaggttagagcacttcaatcctacatttttttcaggttcaatcctacggtccatagaaggtttttcaatccatagaatagaacgcagtcctacatttttcaggttcaattccacgttccatagaaccctatgcaactttatgggaacggaagatatactccctccattttataccccatctatcccataatataagggattttgagtggatataacatattctaatacaattaatctggacataccgtttgtatagatttactataataggatgtatcacatccacccaaaatatcttatattatgggacggaggaagtactataaaagtccaaagaagcctatgcaactttcccctttttggggcaattgtaaatttaccactattttgaatcattattgcaagactgccactaaaaaattgtaaaaataccactacaactgtcattcgagtgtcatccttgcaatattgaaaaaaccggtggcaaatttgcaaatgccccttgtttttatattactccctacatcccattttaagtgcagccgcgctcaactttgatcgtctgtcttatttaaaaaaattttgaaaaaattaataaacataaacataattcatgttttatcatctcataacaacaaaaaatactaattataaaaaaaattctaataaaaaaatttctaataagacggatgatcaaagttgaacgaaacttatgattacactttaaaaaacttatgattgttttaagacggtacaagtctagagaagcctatgcaactttttggggatggaagatatactctctgagttttatatattatataagtatagattaacttattttgggattgaatacttcactgcagccagccaaagagagaacagctgcaacctgtgcaatgtcaaacaggatcggacgaaccagatggaacccttgtttgacaacttctgcacatgtcagcctgaaccggagcagatggaaccctttgctttcagctcacaggctccacaggtgtattgtcaccttggattctctcattccttgtgttctcagacgaaaaacaagaaccaaaaaaatgcaaacaacaatttctgatggatggaccagaatctcaatcaaacgggccatacacaaaggaagcaaatcgaacgggcaaacaaacaggatgttaaaatggcaacattttagggtcaaattgccttgccttcttgaggggtacaccgattaccgcagttcgcaacatattagaactgactgaagaaagggggggaagcaaagctatttacaaggcttaggagggaggaagagcgcaagcaagcaagcgcaccgggcgcggcagcttggcctcagcacctttcactactacggggcatatcatacaataacttaaaacctcaacaaagcacacccaaaacttgtcgaaaacgaagagcgggcaactgataccaggacaagcaccatctacaaatggggtactgcggggcttacccgatacatataaagcaccagctactactactacaccacgaaaagattccttcctaccatggatatgtcgtcttctgttcttgcaaaccacaaaagacctgcaagaagggaagatctgttaaacatcagcgtagttagtttgattgtttgttctgcagttgcaaccaggagcagggattgctgctaaaagcgtacctcagtgaccgaacgaattagcagttctcagaattcagtgatggggtggatagaccaccttggagcccttcgccaactagccctcgttccacggaagtagaccggctatcctctgaccttgagtttagggcacccggattcatcttctggacctcctccctcgtgtagatgaagattttatgaaccatgttgcagaattcactacatagacagatgggtccagttaaaatcaagtctagttatgcatatcagtcaactcaacaacaggaaatgtttctatgacagtactacttacttccaaggatcatcaccaaccaacatcatgtcaccctcattatcagtgtaaacgaccatccagttcttgcttgaactgttcagctcaccattgaagtcaaacatctggtccagttcagcaatcaactcatcatagcaagtgaactttgtaagatctattgacctcccgagtgcgattccttgcttgtggacctaaaaatattattaagaaaagatagtacagtttaaagattgatagtcaattccaaacacgtaaaatccataggcatgatgtggtttaacttttatcagtagaaagataaaataactagcaggtctttaggtgtctgtaacctgtgacagacttagtttatcaataaagggaacaacaatgttgcagaggcaataaagctggaaaatcaagccagcaagcatgataaataaattggagcatacttcgaaaattgttcattagagatttcagcttagagtagttaatgcatcgaaacaacataatcatagggaaagatgcaataaagcaagagcggcgaaccttcttgcaacttcgggaggaaccattttgctgtttactctgaatgtttttggtaccatctggacatgactgatgtttctctctagcagaatcgtgctgagctccatcaagtggcttcacagtcttggaaggatcagagcattcatcctcttcaagtgcatcctgttggagcttcccatcaaatgcaacacttggtggggatatcaatagttcaggttttgcagggctgtcaagagaaatcccaaatagcatgcatgaagagcctttagctttctgaacattgtgatcaataaccaaaggctgtggcttgataagactcgatgaggcatcatcaatgtgagaacttggctcaatatgcccaagccaaccagaggagcgctgatctatgccatgggcccgaagcgaagtgaatgctccattcccaccaaacttggcattaagagacctttgagggagtgtgatgtcaggcgtcattaggtagttctgctgattcacaccaaaaccagtgtttggaggcataagagaccatgtgccagggtacatattatgattggcattttggtcgggataatgaacattgattgtgttccacgtatttgaacggtttccagatatctgactaggaaatgaactcagagggttccgcgtatctttcagtggttgaaatccagataatatctcagaggaaccatcaggccttctcatctgcatccaactctgtgaacctagctccctctggacagaaacattatttttctcttgattgcttcctgaagaccacatggtaagcttttgggaagtatttagctcattgctatcaccaaaacgacttctcaaattcatgttttcttgactgtggaaggcccttggaagaccattttgctgcgagtttgccatgacttttgaagcaactgaatgagaaggcaaaacatgtattagcaatggtagcaataagactacacgtattccagatcgataacaagatcaaatgcaaaccttctttgtttacagcagacaagtcaggtgaggaagctaaaacatttggacgagcccgcttggttcggggtgctggaagagggttgacaggggaagggctgttagcaggttctatttgccaaggagaaaccctatcaggacgaggaacagaagcagcttcatcccatcgcacctattttcacaagaacagctttagaataaactggtatactcaattgattccataaggtgaggaataatacgtaaggtaaaataccttaagggaacgccattttgagtcagcccaaccagatgggtcagaatcacctactccaacaattgtgccagtgaatctagcaaaaaaaaaattaaagcttttataccatctctccaagaggaattatctattagtaaatgttccacatcatttaaaagcagcgactgtagctgcttacctttgctctgcagcctcttcgccttcaaatgtcatcttgaatctcatccctattgaatgatttcgtttcagagattccttgtacagatcacgtggtaccacaaattcagatggactagtcctgcaatatcagtgtcactaactcaattaaaaacatgcaactgattggcaggcgcaatatcactgtcactaactcaattaaaaactttgctctatcgtgtataggattatggattctactacaacaatgagagacaaatggaatagcatcgcttccaaactgaaaacagaattgcttaagtatacaatttgccagttatcacaaaccttggcttgtagtacacagtgaacatggttccagtgttcactgcatgccatgcagttgcaagaacaccaagatgcatactgtggcttgatatgaccgaagatggaatattagcttgttgtctcattgcacgccgaactccaactcgtagttccccattctcacctctattcatgtaataaaaggggagctttggttaagtagactggagcagaaaacaagtaacatgaattgttcagcatgaaaaaattccacacctgagaaatatgaaggcatctccagcaacaaggcgtttggcactcacaaaaacactccaaccactctggagaaggtgtcttcgtggctgacctgatatcatgcaaccagagacttcttagtttcaactttcaagagatactcaaccaactaaaattaagcaagctgcaatgtcaccacggaggacaatggagcaggggagccttaacaaataaagctaagcacgcaaatgaacaactgtctgatagatagccatcattttgcactaagtatcaaaggcaggtccataccaaaagaaacctaaatgcacaaaatatttgcagacagatggtccatatcattgaaccgaattaatttttatacgtgccacatcagattatgcatctaagatcaaagtaaatgggtccacaagacacaaaaatggtctgtattgcattatactaacaagtaaaggctgggaattcatgtcatggaggctgaggaaacaaacatgaaagagctggatacattcttttggcacaaatccattacaaggaggatgaagtatcacctcggaagatgtgacggaagcgccactcaaccccatgaagatccttggccaccagctcttgtgttgggggatgctgactcatatcctgatcaagcagcgacgtcaaaggcattgctacaattagcctatcaaaaaagctgtactggaccaacaacagagacaacaacgtaaccagcatcaagtcaaaggttacaagggcctaaccagtggtgggaggcactcatccgcgtgccggcgcagcaccgagaagccaccatgcgtgctcgtgtccgacgcagtgagcgtcttgcagaaggagtgcacccggggccgctcagttgcagctggtggcaccacctcttcctcctccaccttgtctttggacacattcccgttaccactcccattcccatcctgctgctgtaaatcaacaaagaaaaacacaagctatcagcgttcaagaccccaattctacaccgaaaacgcaagcgaaagcgcctcacacacaccttctccggaagcagggtgagctgcgcatacacctcatccgtatcaggctcagcctatccaaacatgaaacaagtattacacccctcatataccccctaacaaaaatggtaaaaaaaaatagcagcaaaggagctactggggtaagaaatgcagccaggatgaacaccttgagctcgacgttcatgaccttgcacgggatcttccatggcagattgtagagcggagccccctgctgctcggcgacctggttcgtcgatgcctccacctggaacagaacagaagaaagcagcagcagcagaaaagaatcaggtctctcctccaaatcacaaaggcaaggcaagaacatcattgcgcatctctctcccccggagtcgcggttaaaaaattattaaagccccaaactttgggattaaaaaaaacataaaggtactcatgccattggaggcactaaagaaagaccaaatctcccaggtcaaatgaactcacccccgcagtagtagtagtaaccagtagtaaaaaaagcactaaaaaaacctagaattcgtccacggtcacaggaggagcacagaattttccgccccaaatccgcggatttcgcaagaccgaggtggcaatggcgctcacattgggaaaacccaaacccttcccccatcgaggaaaatcatgggagacgaggaaaatcgaaaattcagcacaaaggcgacgtgtttgacgaaccaggatcaagaaattttcaaatcgaagagcagctcgaagctggaagcacccgaattccccagatcgagatgaggagcggcatgaacccgcgccaaaacccccgaaaaactcggcaattcgggatcgatcgccccaaacccccacaaacacaaacccccccccccccccccaaaaaaaaaattcggagagaatttcgggctcaaagcacaccaaatccgcacaaaaaaaaaacagcaacacaagcagctctcccccatccagcccgcgtgggtgagagaagcaacgggaggttctccctctccgcgctgcacctcctcctccgcctcctcacctgctcgatgtggccctgcgggaggtagaagaccctctccccgacggcgggcaccgtcaccagcggccccgcgcacgcgcgccacagctccacgaacagcccgtccactcctccacctgcacaccaaaacccacccccaaaatcctcctcagaaacagcacaaaccaaccctctcacacccacacgagcactcaccaccaccgccgccgccgccggtgagcccctcaaccggcgaggccgccgccgtcgctgcagcagccatcggatctcacatccaccacctctcctctcccccttccccgaatcgctcggagaactgaaagaacccccacaattccgccctccgccacgtccaagctcgctcaccggtgaacccccacacctgcggcggaggggagaagaggaagcggcggaggaggtcggggtgggatttatgtaggcggaggaggaggacgatgaaggcgacgtcagtttgtgtccctgccgctgccgctgccgctgctggctgctgctgctgcgtggcttgtgtccgtctctctctctcttctccgcttgtgtggggtggtgggtgtgggggtgtgtgagggagggggagggtgtcagcaccggcctcggggcggtcgtctttgggctttgggttcgggtaggtagagcggtgaggtcaccgctggttgggctgggcttgggctttgacttgggctgggcctgtctcaccccaacaatcaaatcgttcactaaaccgcatggttatattatgtgtggtaacctttatagtttttaagaccacggtatatttcgcgataaccacgtggttttcgtgttaacctcgtccgtgataaaccatgcgatagatatggtaccaaattattttatttttgtttggaatttcgtgttactattaatggctatgtgtttgatagctgtggttggaagttttggaactcctctttcgtgcacggaaatttggttactcattaccgtttaaccaattaaatattattggagctataacataacttaaaaagtaaattaatataattcttaaaatcaactttcttatgacttttttctcaaaagttataacgtttaacagttttgaaaacgtgcacatgaaatgaaataagagctggtataatagcagaccataaacacatatcgagaagataaatgaggagagataagaatagcggggctacagatatatagtcagctacaatacagactacaagacgcaatgtgtatatgatatgtgggattaagtattatacttgtgtagtatatgtttatagctaactattatatgaattggctgttaaattaattatagataatttaaagttaatagttggctatgctataaacttgctctaaagggaggagaagaagctttggtttggtggctttggtccgaggaggtggctgtgccttgttgcaggaaattcattaagataatggaggggattaggagtaagatagtgtgggctatggtggaccgaggcggtgcttggagcgatgtgattggtggcttcaggagactcggctgctgcctgctgctgctgtgcttttcgtgggggctgagatttccatgctgcccggagaatcttgctttggctggacacgaacatggacatggacatgcgttttaaatccaacatgacaagtttcacaagctttttacacgaaaacaatctaatttcccgtacacattacaaagaaccgaacgcaattttcaaaaaacaaaatgattccaattcgacggccagacaagcccccagaccatacaaaatttatagcttcgtcagttgcacatattacctaataatataaaatgatttattagtaagtgaatattaatttgtaaaccttttatatatgaaaatgttttcagcgacttaaaagttaatactgtaaaagaaattgtacttaaaaaatcttaaaatcaactttgaaactaaatttaaaaaatttaaatattatctttagcttattaggataaccgatgggtcgtttactcgcaatatttgcatggggggctttggagttgcagaaggacgagagacacacgggggttggccttggggagatgtctgggctaacatcgacatgtagaggtggaccatgtccaaactgacaaaacacgcgcatcgcctgggcgacgatgcctctggtcatttacgagtagaaaacagaggcaaaactcgccatcgttttcttgtgctctgctttccatctccgtgcaaaaaaaaaaaaagacttgtttgttcaccagtagctgttgatcagaggggatcacgatatctgggaactcggaactcaacgttttttaaacatctaagttgatcctgtttgagatggctgaaattgagcggttgattggataattttgttttgtgatcgatataaggtaaacaaataaattaactttacagacttcaaattttgtgaaagaaaatataaaaaatgtataaagcattaccttgaaaagattcgatcgcataatctgatttgttgaaaaacccacacatccaacactgctaggatgaagattgtcggctcttcccgtatcccgtgctcatgagtagttgatttagcccttcctgtttaatttacatccacgatgggctacataggtttgtgagttcaactcaaactcgatgttagtcaaacaatggtgttgcttctggctcatagaaaacaaattcttcacccgacctcaagttaaaaaaatagcctaagaacaagttcaaaccagactcacctggctcatagccacgttgaacgagtccgaaattgcttatataccccgcagcaaatccacgtcgaaagaaatgagccgaattagttactaacacatgcgcggaggagatagttttaagtgcgcaggcttttactataaaatagattataggatgaaatctcaaaacaacaataacaaaatgtggtggtttatataattttgcctccataacaatattccaagaaacccaaacctttacaccaaaatctaaattttagaattaagaaaagagcagcgcatttatgcgagacgtgaacaggatggtgaatttctcaaaccaaaaaataaaaaaagggaaaaaaatgaagctgaagcagaggaaatgtagcggtgagccggtgactacaccggctagggggtctctttggcctcttgggactcggcagctcacgctgccgtgcactgccacgtgggccccacccgtacgacctcgccgatgccgctgcctctgccgccgccgcgcgtcattagcattagccgctttactaatccaggattagctcggctggagagggccgggggctgggctttttgggcttgggccggggctgggccaaggtgggagaggcgggctcgccacgtggaaggggaggacgtacgtacgggcgcggctttgtggtgtgggagcgcaccggacgctgtggcgaggcacgtgacggggggtgggccccacgtggtcagtgaccccgggggggaggcacgtggccctcgctgcccggcgtgtgcccgccactagccagctctttccagtttcccctgcgcgcctcgtgatgctttgtgtcactgacagcgtggggccacgtccccggacggctgggaccggcctgtcggtgatcagaggagaagacgctttttctcaccttcggatcggagaggagccttttttttttcttttccagttttttctaatccgagtatttcatatacgtttttcatgaataatcatgtcaatgacaacgtttgtattttaatgagtggcttgtttttttataaacggtgtttttttttgcgcgattttctcaaaccattcagaaatagcacatttctttctaaaaggttttttagcttttttttttgcttttatacttacaatgaaaaccatatttttctctcttttttttcttttcttttctcgtgtgttttttttgcctttttttacaattattttctcacgcgttttttttgcttgttttttcttcaaatgttctttttttgcttttcttcaatacaggacttaggggaaacaaaacttttaatttgttgttgtttttatttttatgcacttttttcttttgttctctctcttttattattatttttatcaaaaacgaccacaagtacctaattgtaagattacagggactcaaatgtaaatataaaaattacaaggtctcaaatgcaaaattacaaacccaaaaattaaaataatataaaaatggaatgctctcgaccagtaggttccgtttttataaacagatctttaatccggcacattattttatttcaccaaaatttgagagatatcacggtatagattgaaactgagaggagtggtggcgggtatctcggactcaaaaggagtggcgccttttctttttcgggggaatcggatctacagtcaggatttttttcgtttctgagagggaatcggataggagtcggactttttttaattattttttcgctatttttttttcacggagatttttttcgtccttttttttggcacgtacggaatcggattatttttttcgcttttttttatcggacggttacggtttttttatcgctcgtctggttttttcgccaattttcgccggttttttttcgcctttttttttgtgcagggaatcggatttttttcgcctttttttttgagacaattacggtttttccgcccggtttttttctcgctagtccggtttttttggccggttttttatacggacgatggaagcatctcttattttttaagtagtagagatagagatgtaaaaaggatttttcaacagtaataaacaggaaaagaataaaataaagtataaaatgaccacaccaccagaaaatggccaattctaccgggagatcgagttattcacgaaattgaattttgcattgtaccgttggttaactcattttattcagtgttactttttatttaaacacttcattaagcaggctcattttctttaataaacctttgcgtcctcaattttttctggaaataaggtggaagtagcagttatatcaccgacatttttaaaaggcaaagatctctcaatagcattttactactactagattaaggcaatgtgctaaatcttgattttctttttgtgagcgcacatactactacctggggggaaaatttgtcctttcaccctacctaatggaggtggactaaccagtaatagcatatggtaataagaaataccaacagttaccaatgacatacatatcacataacttgatttcgacaatgatatgtaaatatttttaactattttctatgggtaggtgtgttggtgtcaacatttatgctacacataagtgaaaatggcgtcatgcatgataacaggtggacgagacaccaagaaattaggcacgtatactctatgaagacggtcaaagaaagtgagtggtaggcgacaagttattatgaatgtcttgctaaatagcaatgttgtcagccaagttgaagcaaatgtgcaccgtgttccaggaggggcataagtgataaatgttagaggtagatacaatacggagacaaatataaataataaaaagttggtcatcacttatcttatgatatcaagtgttgaaagccgtcataacaccatatctcttggctccgcaacacaggcaagcaaacaaaaccaatacaaacgtcactcaacactctcacttgagacaagtgatggctgcagtcagtcaaagtctgaggttgcacacattgtcgtaatgctttggagtaatgaaggttggaaacggttgggtcacatcaaattaaattctcctatttttggtatatgaatattgtctacgagaccgatgcgtagttttatagccatatatgatattggaaagcaaaatttttaaaaaataaatagcttgccaaccttttacaactattgcataagataagtgatcatacacatgagtgaaatatgcaccaatgctggagagacacacgtattaccttgcaatgtgatacatattgcataagataagtgatacacgtatgttattggatttctacataatacactagttaatttttagatatttttttatgtttttatgtgatattgtgacaatatcatatagtaaaagtgtttgttgaagccaatgaaaattgaaaatatatatttgtagatggacgtcatagaaatatttgccacttaatgatccttaagccctctattttctcaaatatatttcattttcaggagatctaactggtgcataaatttcaaaacgggatttgtttcttttttaaaaaaaaaaactttctataagaatgagaaatataagatggccactatcggcacataaagcatccccatgttttcttatgtttaattgtgaaatatctaaatatgctactagtgattctacattcacctacatttcactacatatgagacaagacaagcaggtgagaggatggtaggcgagataggtagatcttatgaatgccatggaaaagaaagtcagaagcaagcatgtgagaaataagaagtgaaaataacctagcgtatatgagtacgagttatcatagttggtggtaagtgatagtattaggatgcaatcataatttaatttggacgcaaatatgtattatcattattgtatagttaagtatcttggcatgacgcaaccctctcttgagggaaaaaaagtatcttcgcatgttagtgtaagaaaaaataattttaaaacataccatactgcatggaatgattgcacttgattatacatatgtgtcacatatgacaaataggataaaagtaaacaatatgtaagaagtactaggaaagcacttgatcatacataatatgtgccacataataacaaataggatgaaagtaaacaatatgtaataagtattaggaaagcttttgtgaacaatagttatgggtgaagtacacgagcataaaagcttatttttctccattctatgctgaaattaacagtgatgctacaagtacaaatgtttcttatgtacaatgcatgcatctagagttgagaaggtaggtatacatatcatgaattaattaaggtagtagaaattaaggaacatgcatatatacgcaattagcctttactaccaacatagcattgttagcgaggaatctccaacttgtgactatcagcaaagcatgtacctaacaattcttattctttgacgaacaatcgcacatttgaagttgatctaatcacacatttggagttgatcccatctattgtgcttagtgagaaagcagttgtatattaaatgtggtatgtgcacttggcaaggtaaaaaaatcacaaaaagtccgactaattgcccttgcataaggaaagtttatgtgcctatttttgccacatgaacgatttatactcatacacatgagaatgaaagcatgcatgcatgacgccttacaagtgaatgatctcatcgtcctttttttaaaacaaatgaatggtctcatctagcttaagatgcccaacatatatactagattaaagttgaaagttgatacgctgtaatgccttggaagcatatgtgatcaaaattggaaatgggtgtgctacagtgaaatattcaatccatttttttaggtaatagatgtcaaaacaattaaccttagttgcaaagcatgtaaattgtaatattgctaacatagtgcattagcaactcgtcactcatgcattagtggcacttgagaagattgtccaaaaaatctatgcttaacactttgtgatgtccttaatattgattaattatattatatgtttgatggatgttatattcataaatgacgtgcagtggtgaatgtgcccaagaagatgatattgatatgtcaaactagtatactatatactattttgatatgttgtaacaaagatattggttgtctgttgtttgtgcataaattgtgatatgtacgtaactcccatatgcaacactttggcatgtctcggtaacacactcactagaagctacaaagatctgcgtagacatagatatatcggttggtagttggaccacacatgaattggtgaagataaaaagtggcaatgtaggtgcattcatgacacattttttttcaattagaatgatacaattttcacctcatttgactctaatgaatttaaatgtggtcaatagaatttgattccaactcttgttattttagaattgggaatttaattcatgctaattccaaaagttttatttgggtgctatcgaagggctacacctaaagatggtatttgtagagtatgggcatcgttggtaccaggtatacatgagattaaggtaaaagagacatgggacaaagatttgtatacaggtttgagccccctaattacaggtaatagctctattcctgtcaatcgaagcaggtgttgcctttatatatcaatatcacacgcgtacaatattaaggatgacctaatctagtctttgttagcctaacagcgtaatgatctcatatgtggttgccaactagcggcagtcgacttcctcgaatacaaacttggcgagattggagttgtcttgtattattttggtctgtattggcttgtcttttcgtgacatctctcctcctgggggtcttgtatttataccctcgggtgtccccttgttcaactaaaactagggagcctagtatggatacaatggaccccgtcgaccttaatgcataagtattgggtattccatatgcatgaaactaacatgtgcttctataaattgcatgaggaaatcaaatcaaaatttttatttggtgtttcctacaattgtacacacatcacattagtagtttaattttgtggctatttgatttacaaataattccatattagagcatgttgtcaagaaaccgtaatcacaccctccttctcccccaaaccattaaaagatggcattgcgattagcaacatgaatcggcttctcctcgatggcaggcttaggggctggtccatttcctaatatcggagttgacatgtagtatctttttagacaagcacaatagttgggaaaaatatgaacttactcttttagtctacatcccaatttgaacataaaaattttgatcggcaatgcctagataaattgaaatgttatttggtttgttgccacaagatcgacattcaagtaaaccatacttccaccttatacactttccaaattttcaacatccaactaaatggctatatagtttactaaaagtttagcaatgtccaaatctcgtcgtaaccaaaatcttggtaaggaccacattaaggttgatcgaaacaaacacttcatctgttgcataactgcatgaacaatgcaagtcactccgaggagtggccttggatgtcacatggccccaagtagaccaaggccacaaatctaaaagtattttctcccataatgcaagatggccttaaccaacaactttaattttgcaaatcaatcccaccatttttctcaattaatttttgagcccaacaattcaccaatagaaccctatagaatgaacataatttacacaacaaccgaatagttcgaaggccccaccagttaggttctcaatctatttttgttgcttcctaatcccactttcacgattcgatctatgttcaatgaatcactgcgagcaccccacacgcatatcgtttctccaatcgagcatcgcatcctgatggctagcctcttaactagcgccatcgacttctgatccatcgcctctaacctcagatctagcaccgtagacggtgccactactcccattatagccaaatatggtattcctggtcatcggtggtgagcatggatcggtacccttgtagcggttgacaaggtagctagtgcggttggccttggtggtcgaggaggagggtagatagcagcatgctcgaccaaatcttcttcctttgctcagatctagttctagttccctcctcctcctctttgatgccgctagaggagtagcgggtcgacgcagattgaggcaacggtgttatttctggccacaagcttgtcaaatctagctaaacgcaaggtagcagcgacaaacactgttgcttcttctcgggcattgtcctgtctccctctagggcccatacaggagcaacaacctccccccaacatgtgtcaccacaatggcctcgccccgagtagcttcatgcctatcaagacgctcgagcagcctagtagaggacacaaggagcccaataaggcaaacaagttcagtcgagtttagggcgttcatagtgcacctacgtggtgtgtggctctagccgccacgtaggacacctgctgccgcgtggaagagaaaattgcttggggaccatatcttcacttggaagctcaggtcttacttgagccacgagtttttcagcagaaaaggcaaggaatcatcctgcagcggtcccactcgagctcaaaagcccttttctctctccacccaagctcagcagcaacaagctaatgatggagtcatggcgggagggggggaggggcacaacaggccggaggttgccagcgaaggcaacaacgatgcttgctggtgcactatgctcgatctgcacttgccgatgaaggaggagaagggaacccgatccgccgcactaccccatgcctggcttgatccagcgacgctatcaagctccatttccaccgcctctagtactcaatgcctgagagggaagaggccagatccggccatgacatcgggtggcggtgttggatctgagtgacaaggagaggccatcgctggcagagttcactgccaaggtgggggagtagggaggcggtggccgccgcgttcttgttcttgttgccggggtgcgggaggtactggcatcggcgaagctcgtcgccaggagtggagaggccgtcattggcgaagtttgtcaccgaggtgggggaatagggaggcggcggccaccgcaatcttcttcttgtcgccaggatgtgagaggtgctggcaactgcggagcttgtcgccaggagtggagatgccgacggtggcaaagttcgtcgtcgaggtagggtggcaagggagacgggggcggcggagtttgtccccgatgaactcgctgaggtggtgtgagtgaggaaaggggaacgggttgtgggggtggacccggtggtggtgggaattatattcttttctcgattttagggagggttattgtaaactttagacttctttgtaaattgagaaaaatatgagggctgaaactaaaagtggtacgagctaaaacaaaaaattgaaatcactcatgaggccatttgcactgttagataaccaaaatttgaaccgtgtctttagtatatgcggcatttttagattcctcaaacgagtagcttgcattgctactgtccttagagccgctgcacggcgtagcgagccacagtcactagccagatcggtgcactgtgaacgcccggccctaagcagcccttccacggatcatgttgatgaacatgaaattcctgaaatttttacattttggtcctttttgaaaacttattttacaaatagacccctgggaaaacttaaaccggaaatggtcctttttgggacgccagagtggctggcgccgtaccacaacatggcggcgccagccacactggcgccgtgcccgtgccaccgtggcaatagggctgtcgtggaggtgctgactaggccgaagggggcgccagccaaagtggcgccgcccctcatagcacggcgccagcacggctggcgcgcccctcctctgcgggccccaccaactttctcccccccccaaaattttcgccaagtctgttctgcctccaggcaacggctggcgccccccccccccgaccgcggcgccagggtgtggcgcccccctcctccccccatcgaagcccttctgcctccgggcctcggctggcgccgccctcatggaccacggcgccagggtagctggcgccgccctcccccagcccgaaacccttctgcctcgcggcactggctggcgccgcccttcccaacctcggcgccagggtggttggcgccgccctctgcctccctgcaaattgaagatccatattgcacaaatgtaccaattcacagttcgcaattcaaatcacaattcacagattcgtacagactaaaacaggttccaattgcacaaatcacaatgccaaaagtccatcacatagtcctcacatagtccatcacatattccacacatcaaacaatgccaaaagtccatcacatatcccacacatcaaacaatgcaaaaagtccatcctatattccacacatgaaacaatgtcaaaagtccatcacatagtcctcacataatccatcacattttatatcacatagtgcaccacatatgtcatactaccaaccaatagattaacttcatacaaattacttcttccgttggcgccgaattgcttgcgagcccggagtgtacctacatttgaaaatccaatgtttaaaacattttaaaaacaaaataagggaaatcaaataacatttgagaatggtaagctcattttacctctttttcgctgcccgagtggatcgcaagttgtattgcgtgggttgcgtcccctgaggcgcgtcgggaaactgtgacatgtctatctcctcggcgtctggtgcgacgtagtcctcatcctcctcgtcctcatcgtcatcgtcgtcgctaggtggagccggcgccttcccctttcccctcccttgcttaatgcgtgacgacgacgagccaccaactccttcacgctcttctatcctgatggagtgtcgagcagtacttggacgcgcggattgaggtagtggtggtggtagtctccccggttggtacacgtcgtccaatccaaccgacctgcaacctaatcttgctgcaagtttccggcacctttgacgaactttctgcatttcaaaaaaaaaaagaagtttgttaggcataactcaagtaatgcaaagtgctaaataaattttacctctaaaacattgcggagcgtgttctccgtgtcctcaccacccctcggagcttggagggcatgccccatttcattcacactcctgaggagctctctcgactgaaagcgtgaaaagatatatgttagggtctagggtgcaaatggaagtaactttgataaatgcaagaaaacttacgactctgtctctaagtggggcgtgctccatttgatatccaactctagtccggacatcatagggattccgcccctcatcggagtcgcggtcatcctctatgtcggcttccgtccaagtagggcggaggaacagtctatatgtcctatgcagccaacgaaggtactctgagaaaagatgattttggtgtatagtctcgatgtacctatcgttccttccggctgttctccattcatcaatgtatctattatgctctagcccccagtctttcaccttctttgttctcaccctgtcatacctagacaagtagaaggtgatgaaacagtagtgagcatcgacaagggttaaatggtacaaaattgaacattgacaatgaaagcaaacaaagataagaaatatttacttatgtaattcaactccagttgagatgtcctcaaccggccaatcttgtttcttcccgaactgtcgcatgacacggtgcggaaggtggtactcaactgcccagaaacaaatcaatgggcactggtacatgaaatagtcagagtctcgattgcacatcgagttcagggtcaggcttgaagcctcatttgtgtggtatggtaactactcaatctgcaaaagttgaagagatgtcgttggttagtatctcaattaaagaagtaaatgtctaactagaagtgatattggaagtacttacatgttgaggctgcaagcagtccatctcattgacataatgcttgtatgccacatcccggtgagcatgtgcagtggcagtactctcaaaaaggtaggccactgtcttctccatgtctggctcattatagggccaaggagtgaagctttgcctccacttaggccttccaaccggtagtcttaaccacatccacatctgaatcaatagcacacaaccactcatgttggatgatggtgcctgacgacaacaggcctcacagagctgtctatatgtccacgccaacactgctgacccccaactgaaacggcccagatcaccaaggttggcgaccaaaggaatccatatcgccgaagcaatgtcacccccagcatcaggaaacagaacccctcccaacaagtgcaagatgtatgcacgggcataacactcaacacgccatggctcagcatcgtcatcaagatgtgagaagttctgactcagccaagacaggggtattccattctgcttcttcttccccccttgcccctgctcaatgttcagtggaatgccaaacagctgctgcatttgtgcatgccatccaggagtctctgtcctgcccgtcacggcatgcccccgtaatgggagggccaagatcatagccacatcctgtagagtgatggtcatctcaccactggggaggtggaagctgtgtgtctcaggcctccatctgtccacaagtgctgtcaacgcaggagcgttgaacactggcattcctctgctcacgaccaaggccaccccgagcaacccggcagcccttaggtacgggatgtacctatcgtcaaacactggggggcatgagctctgactcggagcggttgaagtacctgcattagcaattgtaaatcaattagttaatataatgtcaaatacacgctaccgatacttatgcacaagtgaatcaatgccgattcataccctccccgccccgatcgcagccccgcgatgacgggcctcgtagtacgcctccaaggctgggtaagtcggcggttgtccctcctcggccatcctacatgaaaaagtaataaattcaccgttagttaccaatgtgacatatattaaaagaaaatgaatgcaagaacatgagtaggaaaacaaaatatttacctccctaacacttaaattttttttggacttcttcttttttggacgcttaggacacttagttttcttgtgaccctcctggtgacacaacgagcatctattttgcaccggcgcagcatcaagttgaacgcatgaaggtggtttccttccataaccacccagacccgagtccatttcgttcttgaatcgtttcgatctcctcttccctcttgttttaatcttcaaatttgggtcagcaacaaattcttcaccatcgtacgatggccactgtgtggggtcgaggtatggctcaaagcgacttgcccatgtgttcacaacggctcttgaagagaactgatacggcattcggttgggagattccttatcaattgcatgaatcagataaacgtgtataagatgtgagcaaggcatatggtagagcaatggcctttggcaagaacatgagttcccctcaccttcaactttgaaggctcttgcgccgaatctaacaccaccacgcgttataccacccctctctgtgacctcgtatgtctttttctgcttatcgaaacaccttgcagtgtgtttgttcgccttactttcttgcaccttcatcttactgtcaaccttggtggaccaacgctgccctaactggactcgcttcaaagcttcatcatgtctgttcacaaagtagtcattacacttcatgaacgtaaatgatacgatggccgtcactggaagcttacgaacaccaactagcacgctattgaactgttcggccatgttggttgtcatgtaaccccaccggcggccatttctatcgtatgcacgagaccacttatctttatccaacaactcatcttcaagccatttacgaggaccttcgggaatacgctgccttagtgcctcaacatccctctcaaatatccacttctcgtcaatctgacatatccttaggagttcttttgtctgatgcttgtccgcaccggccttgtggaaattagcactgaagtgcctcatgcaccaccggtgatgaaccgatggcaatcctggaacaggagtcatcatggcattcattataccagcatgtcgatctgagataatacaaacctccctatgcggcccaaccacaacccgtcggacaagatcgataaaccagcaccagtctcgtgagttctctttctccaccaaggcaaaagctaaaggtacaagttggtcctccgcaccagctgataatgcagtcatcaaggcaccaccgtatttcccagttaggaaggttgcatctatagctagtactggcctacaatgcttaaaagcctcaatggaaggaccaaagcaccagaatgcacgcataaaaattttcttggtcactccatcaacgttgacaaccctatcaggatgagtatcgatgtggtagaccatactgggattcctctgcttaatggcttgcagcaaagtgggcaaacggacatacgcttcacccgattcaccgtaaatgagcttcatagcctcctctcgtgccctccaagccttgccatacttcaccctatactgaaaaacctcaaatatatacaaagctaacgcagaagcagagagtgtaggttgcagttttatggcattgcataacctatttgctatgaactttgatgtcagttgccggtggctccctgaaccttcggcagtagcacaactatgttccttacctacccgtgatatcctccacgtgccactagacctcttagttgcatggaccttccatttgcaccgtgggttttcacatttaacagtgtacctcctatttgcggcagaattgacaacacggtatggacgatggtgcacgatggcgtactcctggagccatagcttcaatgcgaccatggatgggaactctaaaccctttctgagaccatccacctggaatggttctggcaactgatctaggttgatgccgccatctagtagtgcaccatgggcatgtgttaggtccctaaactcaggaatgtccggcttcctcccaaacaccttctcaaacgcacgacattcctctaatgctaacttgtcattattagtaagtggagggaatggacggtcatcatcagagtcttcagcaaattcaacatcatattgctcaacacttgcctcctcgtcaacatcatctctattgacttctactgagacagaatcgtgaccaccactcaattcgacatcaaagtaatcatctggattcacatattggcctgctacttctgtcgggtattcagggttgactccgtacgacgaccaatgaacactcgccgacaaatgttcacttagatcaagcccctcttatactaactcccttttcatcaccctcgctgcatccacatcatcagtaccgcaatgtctctttgatggtcctgcctcccataaatcatttccaagcaaaggtctcttcttctctccttccccctccaagtcttctcgtaccaactcactcttacttgcaccccctccacgacgagaataatatatcacaaaattcttctcaacgtaatgataagaaggagatttgtttagatccaaattttctacggtacgaactaactttgatgcaaacacctctagagatctaaactgagactcttttaccaaatcaaagtaaacttcccattccaactgacctatcacatttaatatatacttatgcccttgaccaacatcgtatcgcccataaaaacgaatctccacattatcctcggtccatccaagaacttctttcactcgtgaccttagttcatctagagttgggtgggtgggaaacaaaatggtcttcaatgacatatcctcaaactcaacatgtccaccaacataaggttccaccactctaccaccgtagtaaacacgaacaagtctatccatctacaccaaaaaatcaaatgtaactttgcaacaaaaattaaatcttcattcctaaacgtagtccaaaccgacatattataaccaatgcataacttaaattgtcccaaagctactactccaaaaaaatatttaatccacctacaactatcaacaagtttactactgcattacacatcgaaatattacaaatactctatcatacaacccaaacctccgtcatgcctcaaccataatttttcatccatccatccaaccaaaccatccaaaaattaacattaccacatatatggttaaaaaaatcatgacaccaatgagtacattgcaaacatgtagcactacaacaagccaatcctaagaacaaatgctaaaaatcacaaatttgggtaaaaaaggggttctagggttacccaccgatctacaaattcaaccaataaaaatgaaaaaaaaagaggggggaatgaaggagtctacctttctcttcgatttccacaaaaaatcccgcgaaaaacggcttcaaattgagtggatttgaggtggagaggtgagggggagagagagggagaagaacagcagctcgctgctcgggctggaaatggcgaaaatgggagtggggaggagaaaggtggtggggcccacggggtttaaggcacagaggaggggcgcgccagctatgctggggccgtggtatgaagggcggcgccagtgtggctggcgccccctttctgcccagtcagcacctccacgacagccctagtgccacggtggcacgggcacggcgccagtgtggtccgtgttggggtctctggcgccccaaaaaggattatttccggtttaagttttcctaggggtctatttgtaaaataaattttcaaaaaggaccaaattgtaaaaatttcagcatgaaattccatcagatatggagtaccctcggtcgaaccgaggtgagccgctgagacctgaaagcacaccagagtgaccccccaaaaccccaaaccccaactggtgagctcgtgacacacacacacacagacagacacactggcatccatccacggcccctcggcgagcgacaggccaggagcagcatttgacatgatgtggtgtggtacaaactccaccaaaaagcttttctcctcatttacccccggggcaggcaggcgccaccttcttttgggcgaacaggggcagagcagcagccacaacgcccatggctattgcctctcctctctctcttctcttctgcacgctgcagtccctgcaatctctctgcttttttggggttggggttggggagctcagctcgcaggtctctcacatgcccaaaaatccaagtgctctctctttgaatgccgcactcggttactgctgctgctactcatgaatctttgcaagcacccatcgagtgagtaatccaattttacattctaggtaggggggtgttgtttgagctcacaaaatttggacattgaaccatgtataggggggagagagaaacactgttgtttgagctcacaaaatttggacattgaaccatgtataggggggagagagaaacactgttgtttgagctcacaaaatttggctgtgttcgggaggtgagattaggaactcacctctcgcgcatgtaaaacggagcgacatattttttttttatattaattaagtatttactattttttaaaattaattaatatgatttttaaagcaacttttgtatagaattttttttgaaaaacatacaccgtttaacagtttgaaaagcgtgtgtgtggaaagcgatggaggtgagttgggaaagttggggaaataacttagccaaatgttgagttcaagccaatgtgggggccggggaaatctcttgtaccgatttctacgtagaaaatcttgcgaaaatcctataaaatccataatgttatacattaaggaacattcccccatatttgatggcgacgaatgtgattcaggttagcgggagttgagcaaatagattatcagccacaggaaaacatcggtagtgtagtcattggtgtataattctaccaaaataatatttcacgcgttgctgtggaaacttttagcatgtagttttgttgtggataagagcaagccattagcatgaatgtttatgaatagaacagagctgtaagcgtggtaactggtaaactaagtacttcctccatcctaaaatgttagacgccgttgactttttaaaaaatatttgaccattcgtcttattcaaaaaatttaagtaattattaattttttcctattatttgatttattgttaaatatacttttatgtatacatatatttttacacatttcacaaaagttattgaataagacgaacggttaaacatatttaaaatggtccatggcgttaaacatttagggaaggagggagtattaatttaagtagctatcaaaagtataccttaaacttgttagtagtactagctgttacaaaacttgagggttatcagtggcatgattttaagacaatgaattcagaactatctgcatgcagcaggctccacttgtgatgctgacaaagttacactattgtactcccctttacttcctactttctccgtctaagaataagtcaatctagtatggaatgtgatataccataatgcgatgaatctgaactaggatatatcatatcccggactgatttacttattctgaaatggaggaagtactccttatgtctaaaaataagttaaactaatttgagacgtaacacatcctaatagtacaaatcaaacttattttaagacaggggaagtacctatgtaaaaaaatgattataataggaaaatcaaactacatacgactggaagttccttttggccatttgggtttaaataggagtaggagtctacttaagcataagatgcacataatctattttgaagataacagaggaaaggcgatgtgtaacgggaatgtcaggaagaaaatataataaaagaattctaggaatttgttcatttgaagctagaggttgatcttaccaataatttcaaatcaaaccgcttcaaaataatcaaaggggtagaaactgatacatacgagagtctaaagggggcatgtaactgattttgtgtatctgtagatagatagagcaaagagaaagtaagaaatgaatcatatatatcaacgagaggtgcaaaacggaaacaattgtacatagaaactgaaccgaataatacaaaaatgtgttatattaatcaataatctacaactaagtagcacctctggcatggagttcggattaatgaaaatgaaagacgagcaaatggattttcttccaagttatactcctaattgaattaggtctcgcatcaataacttaggaaattatgagaatatttttcttagagtaactaaagtgttgtaaatattttggaagaatccttcgcgtcggtcgctcggggggggggggggggggatcgggcgctccctcccccgtgacgcgcatggcctcctgggccccaccacgtgcccctgcccccacctgccacgtatctccaccacatactccattgcaacaaatcaccaacatattttggaaaccctctattaagagaattcgttttattttttattccataaaaaatgtttcacttggtgcactcacaatgtttcactatgtatgaattaaatgttgcagtgaattgaaacttttttttgcaacaaatcacacacaaattatggaaaccctctattaagggaatctgttttatttttgttccacaaacaatgtttcacctagtgcactcgtgatgtttcactatgtatagattaaatgttgcagtgaattgaaacattctttcgctatttgttgaaacattgtttttatgtaaggtgaaacaacgcccaatttaaacgattgaaacattttcgatctacttagtgaaacaattctgatatatttggtgaaacaacgtacaacatttaaaaataattcaataataagctaaaaaaaatttcattggaatatatccatgtgtggtcttgttttaaaaatttaattgcaacgaatttaatggtgcaatcggattataatttggataaataatttaagagccaaagatagtttaaaatagttttgcatgcatgcatgcatgctgacgtcagctgacgtaggcgctcgatttttcccaccctatatcgggcgcccgacgcgtagtgccctccaatattttgaggatctaaatttacacaaatttaacaatttggtatcaacatacaactagcaaccaaacatgcacgtacatcatttccaagctgataacaatactacaatttctttttctgagatgaataagaaaacaaaaccattttactcctgcaaactattacaccggagtacttaaccatctaaataattttttgacgcattttacaacccgaactattgaagttgtatgttgtactaaaatttggtatgattaatgacacatacattataacttacttacctatcaatatcattttagattttttttatcgccgatataggttggaaaaactaaaactgattaaacattgaggttttaaattttaagcaaatagtcatgaaattagtttaatatactttcgaactttgacagtaccgtcttctattatatggtttttaaaaattaccttaaaatacgagtcatacaactaaagaaaaaatgctactaaacagtaaacagtagaactatttcttaccctctccgtcctagagtataagcacttttagaattggagagagtgttgtgattagagaagaagtggaggtaggtaggaaaattgaatagtggagggttgtgattggttgagaaaaaagaatgttggtggagaagttgttatattttgagcctgcttagttggtgaaatgaaaatttttgggtgtcacatcggacgtttgaccggatgtcggaagaggtttttggacacgaatgaataaactaatttcataactcgcctggaaaccgcgagacgaatctttttagcctaattaagccgtcattagcacatgtggtttactgtagcacttatagctaatcatggactaattaggctcaaaatattcgtctcgtgatttacatgcaaactatgcaattagtttttcttttttatctatatttaatactccatacatgtgtcgaaaaattcgatgtgatgtttttgcgagaagttttaagggaactaaacatggcctttgggacaaattttaatggctagaagttgtaatattttgggacggagagagggtaaatgagaaaaaataatttaaaatgttaatattctagcgaaatagttcgagaccgatggatgaataataatgcgatttctacgagtagtcaattacttattccaagtctatgtcacatcggatgtttggacactaatttggagtattaaatatagattaattacaaagactcattccataaccttggactaattcgcgagacgaatcttttgagcctaattacaccatgatttgacaatgtgatgctacaataaatttttgataattatggattaattaggcttaaaaaattcgtctcgcggattagctctcatttataaaattagttttttattagtctatatttaatacgctaaattagcgtccaaactaacatccgatatgataaaggaaaaaaaaaacagccccatagtgcaagaggtggcccaacatagttgcactcctgttgctagacagctagtaggttactgtcactcgtctgccgattcagtctactggacacactgaaacaataaaaagaaaaaaaaaagaaaggtctccagaaaaaaaaaaggcgggaagctagagcagcagcagcaaagtggcctgctactgctaggtggggacgcacaagggcccactgcgtccggggcccatcccgctgcaagcagctgctgcctccctgggcccaccacgccgcgggcccacacctgccgtggcaggcccaccttctgaccgcccgggcccgcgccatccgccttggacctactcgtcgcaaaatataattttttaggtttcgacgcagttttcgatattctattttaaacaataaaatctataaaagtaagataaataaaaagaatctcacgttatgatagtctgttaaatgataaatatattttacatgatttattttttattttttatttagttaaagttaaaaatatttgatttgacactatcttaaaaatatttatatattttataacagatggagtaattatctctatctagagtgagcgagtgagcgggacacgtgtcgcccatgccacgtgggaagcgtagagctgcgtccgacgtggcaatgcaaatagttatgatccgaggaaattattagcagtcccaataggaatttcgaggtatttcgttgagatttcagcgattcttccatgtttggactttgaataagcgtcttgggtgggtgaactgaggcctggttttccctaatttttttttaaaaaacgtaacatcgaatctttagacacatgtatgtagtattaaatatagattaaaaaactaattgcgcagttagggggagtcgcgagatgaatcttttgagcctaattagtctatgattagctataagtgctataataacccacatgtgttaatgatagattaattaggtttaaaagattcgtctcgcggtttccaggtgagttatgaaaatattttttttcattcgtatccaaaaactctttctgatattcggttaaacatctgatgtgacatctaaaaattttctttttgcgaactaaatggacctgaattgctaaggcttaggtcttcctcttttttctctatgatttcgtagtagaacaaatctttgtccaaacttctctgaaattttcatgtgcgttgggctatgatgatactgagttactgacatgactaaaactcaagatcaaatgcacttgatgttgatgtgaccagaactggagatcatgcctggctatacggagtatagttgacagtgtccgtgctaccagcgtggtttagctagagcagagagtagaaacctttcgtcgtgtgattattactccctcagatccattttaatttcaagtgcagccattagttttcgtgcccaatttcgataatccgttttatttaaaatattttataattaatatttttcttgttattactccctccgtcctattttgagtgcaaccatgagtttcggtgtccaactttgatcttctatcttatttaaaattttttatgattacatttttattgttattagggcagccacaatgtggccataagaagaggccataaggttttatagtgaccatatacattgtgaaacaaaaccataaggcattaaatgcaaaagaaagctttaagcttatggcttgaccacaaacaataaaataatagggtaaaatgaatgtgaggatgaaaaatttgcatggctgataaaagaagtactagaatagtacattgtgggacccatcttaaagtttactcttgcttcaaacattgtggtaataaccataagaatagtgggacccaccttaatgctatttatgatcataaacattggagatgcccttagatgataaaacatgaatagtaattcatgtgtgacttctgtttttattttttaaaaaaaagtttcaaataagacgaacgattaaagttgggcacggaaaattatggctgcacttaaattaggacgaagggagtagattataaaacatgaatagtactttatgcgtaacttctgtttataaactttttcaaataatacggacgatcaaaattagacacgaaaaatgatggctgcacttaaaatgggacggaggaagtatcttatttggcgcagtcaaaatttaaattctaaaacttatttctaagtcggttttaagggtttttatcatagtttgttttcaaccactaataacaatctaaaccgctatgaacatgataaaagaaatttatattgttttgttcacttcattttttttacggtttatcaattagatcataatgattagagtccaagtcattatctttcctagcgcctatgtcaacgacaccacccattgccttgttgacaaactggttgatgccaattgccaaagatcataccagtattattcttctatcagagctctagtcaacattgtcaccatgaaacgacctagagctgcatctcaattccaataataatgtactagtatatttcaaatcagacctaaggatgtttttatgggaaaaaaaaatgtttggtgccatcaagaacatcatcatgaagttaattatgcaaaatcgttaatgagtcggcccacaaaattaccactgtacattgacacatttacatgtatgtgtaacacctggttagtctcgagctgagctttttagatgtattttgttagtggccttgcttactcggttactacttatttcttcattggccttatcagctgttttaaccactcattatctaaataaaggaaagatgctttaactagttatgagaaaacagagaacaaaaggagacaagccctctgtttatgatatgtgcagctgtcccattgtttactcaaaaccagtggcggattcataaattttatagagcccgagcaaaacccacatgacccaatatcattgaactctaacatataagcattgcctactatactatccgggccgacgagcccgaatagctgcccagggtcattgggctgggccgggctgggctgggccgatgtctgtctccaccgatgactggagtgacaaaagattggcatctccaatgctataactttggtctacgaaatgtagcatctgatgtattccttattgttagacaatcatagagtaggacaaatatgtacatatcaggaaagtgatcgtgtcaaagtgtcaataagatttggtagtgagattgggtgcttttgttggggagctagaggctgagatttccatgcttttagatatcctgtgatcgttgtacacttgtacattggatcggtataatctttttctgctttgttgttttgtttttatactaaatcgaacgtgtggtgaatctagtgcatggtttgagggcagattagaagcaagggctcgcagagccatcgtttctcttattctgcgacatatttgtaaacgaaaagtaatttataaataaaacttttatttgtaaacaaaaaataatttataaataaaacttttatatacgtattcttagtgatctaaaagtaaagactgaaaaataaacttcgatgaaaaaaaaacctcaaaattagcttcaaatttaagactgaaaattcaaattttggctgagaagcatacgcataagcgaaaagattctcctcgtatttggttgaactagttgaatgcatgcgtactttggtacggatcaaagaaaatatatcataatattatcttaaataaatatatatatattatttatttattattttgctataggtaatattggatttaattttgatatatgtcaatgcatttagtttagttgaattttaacattaagaaactcaaaaggtagtttgcaaagattataatagaattagatggtggtggcatactgaaccttcttttatagaaatatatacagatattttttgaggaatattttgtttagttttgttcaaacaacttcaaatctaattagaactttttgagaatttcattttttttcaagacacaaaacacacgtagatgcttatatagaagtgtgtacactcgtccctttgaatgtacatataagaattcgaccttttgttggtgagatatctgcaaatatagttaaaatgtgtttagaatttgaatttatctcgacaagtttctgcccgacattttctttaaaaagaaagagagaagttgatccctgggcagaagtcaccaatggtttgcaactctgcataagaaatctatctgtctgcttattggcccccggaccaaaagtttgcatacatagcagcaaaccgcagtttaggccgtgggccgtccttctggccttcctggcccccggaccaaaagcttggagatggttttcaggctgacttaaggccattgttgaaaaaaaattatctttcatcgaataattataattgctatgaattatctattagattatatagataaattaaatattttaaaaataaacttaacatagcttaaaataaattggtctaagtaatactagaggggatttttttttcagaaagcatattttataggtgtggtgtgaagcaaataatctgctataataatttaacctactcccatcatgaaatatagtaagttttaactatatatctggataagttatccaaatttatagttaaaacttgaacttgctatattttaaaacggagggagtagcattacagttgggagtgctggctttgctcacaatgaacgtgctctgactctgaggagggagagatatatatattatgtacacgaacaagtagtaatagacaggcgatttcatcgtctggtagatgaacagtttcgaatcaccaagagatttcatctccaataaactagaatcatttgaatgtaaaagctaacaataaattctttgcacaaacgggcatttggtctagtggtatgattctcgcttagggtgcgagaggtcccgagttcaattctcggaatgcccctcttaaatttcactttttgtttgaactttttctgtgttctgtccgtttcaccgttttccccgacttgtattgtactttcttttttttattattttgcattttgttcttaccggtccaagaaattttcataattgataatttcatcacctcgtttacagttggaaaattgtcagtatcaaacaggagggacggagacatggaaggcaggaggggtcttctgaagataaaattaagtgtttcacgtaaaacgaggtagtaataatatgtgattaattaaagttttaattattaaaatacttaaaaatagattaatctaatattttagaataactttcatatagaaagttttcgcacgaaacacatcgtttagcagtttgaaaagcgtgccacgataatccaaaattttatcctctcctagtaggagaaacgaacatttcatggcttaaaaatttacaccaaatttatcgtcgattgatgtacctaatttgaaggggtaaaaaccaacgctaggggcctgttcactttgatgtcattttcaaccataccattttgataaaattaccaaaaaatgtatatgtttagtttgttgtcaaatttgctaaatacataagaaattttgctaaaattttggcaatattaccatcttaccaaaattttggcaatactaaaatttagtaaggtttattttgactacaatctgaacatgccttaggtttttagataaaccaatacattgcacgactttgaatgcctatattagaggtcatctctatatgactcgtaattttttaatgataatttattttatttaagttttaaattcttgcataatcatatgacttgccaaacctcttgctatgttgtaagatcaacctctttgcttttggattccgaatttcatatcgtcggaagatttgagactaagcattcaatggcagtatctgctccttgatactctcttgctattacagcaagaggagcattacgaaagtgtaaaaaaacagtacatcaacgtgtgcagactaaacacatgctcacagcatacagttccagttatgagctaggtatcttttggcaaaaaaaatttggggcaattgtaaatttgccattggtttgaaccatttttgcaagactgctatgaaaaattgtaaaaataccattagtactgttattcgagtaatatcttgcaaaattgaaaaaaccaatggcaattttgcaaatgccccaatatattttggcaacatatagtcagattgtattggtccatgtaagctacatcttctcggccattatgtgcaatttgcatgacttcgctgtatggaacataagaaccacactctgaagcaaaggtgaatccagcaggaaaaaaacaagacctggggatgatatatattcaacgaaaatatggcaagttataagtatagtatctgttactattcatcatgctgttactatacatcatgaatagatcaattgtatccgtttctacacatgcatttacttcagttctcaggttgctgcaagaggcacctgataaatttatatatgtatctgcattcattagaatgatcttttaggggcaaaattgcttttctgattagttattggctgaaccatatatttcaatggactattatattgaacagaacatatgcatttcactgtaggtaatgtctaacctaggaggctaggacgatggggaggatgtgggcttggggaaagaggaacgtccatgatggagctgaggctgcgtaggtgcagtaaagagagacccatggtacggttgcgttgatgtggagcaggggttacgccaacttgctgctggaatgttatttcatctattttagatgatttggaaatgttttgacacatacatctacctttttgcctctaccctatcagttcccatgctgcgtgagatgaaaaggggattgatggagccaaccccctttctcggcgatggagatggcgaacgatggtggcgggaaggggagaagagtagagcgaactaaggaaggggagaagcagaggtgtcggagatgccatgttcgggagatgcctacgcggccatgaccagtgcggcggggatggaggtccatggcggcgacacggctaatgaggagggagaggaggagctcaagtagaaggcatgggtatgactgctcctcttcctctccttctccttcttcttctcttgtacttctccttcccattatcgaccctggtgctccctgctattgctgccgctgccctcgcggtgccactctcgatcctcgtcctctcccaagaggtagcgcttcaaactgcaccctgcgtcgtcacgaccaccgctgggggagcgtcggcatgagtcgcatagaggaggaggtgagctcggcgttggtggcgtagggtggacttcctgggtgagcatgggagcggggagtggtgcccctagagtgaactggggaaggggagaagagtagtcgtgttgtcgaccatgatccgcatggttggaatctaggcatagggaggggtagtgagggagaaatggtggtcatggctcgccggcagtggtggagctaggtgtaacctgtggggtcagctgaccccacatgtttttgcaaaatagtccaaaatctattgatatttacattgcaaccatataaaacttaaagaattttacagatatgaccccacatgttttcaccgctggctccgccactgctcgccggtgaaaggcacaaagcgacggaagagaagagattgaatccatagggatattttggtcagatcaccaagaaaaacagggaaaaatcatttaattgataacaaatgaaagacatgacattgtagcatgttagtctcatgtgagaatagcattttaatgaagccacactcgggagtggcattcgagtaaaaccccatcccgaagtttgcataaggccaattttctcagaggaggcggaggggatggtggtggaaactacggtccctaggaggaggggaggtgtcatatcgtgcaaggctacagacagtgaagagtaaacacgattcttttagggatgtggaaggaccttttttaaaagaagtttttggaaggactgagaatatattttgccaatttaaggatccaacagcctatgatgcctggagtaaaaatcagacgctcgataatatcttgatgatgtggcgttgtattttcgcgtgaagggtttcaatattcacttatcgctttgaatcgcaagaatgcaaaaatggaggaataggaaaaacgtaggattctaataggaatgtaagtgcaaaatagaggattgcgaaatacagaaaaatacaggaatgactatttgattgtaccgtagaaaaaaacgcaggaatcgaatgggagtgatagacttgaaggaaattttttaagaggttagagctcttgctaaatttctttcaaaatctctatatgcttgtccattccataggaattcaaaaggataacataggattcaatcctttatttcaaaggcttttatagaaaattttcctatatgattgaaatcctccaaaattcgtatatttttcttccaaatcaaatgggccaagcttttgaaagtctaattttagtctcaaggttcttttgttaatttttacatgaaagaaaattttgatttaagcctcctataaaggctataacaccatgcaaagcctagtttacttgatttgttccatgtgctaattcctttctcgaaggtactttctctcctttttcctactggttttacgcgatttagttcatgttttggcgtatgggtatgctgcttcttgggtgtcctttgcgccaacatcatgcagcttcttgcgtgactcggtaagtcagcaatctcgaatgagagcaggacggcggcgtcacgcagcttcttgccatccatggcgccgacggccacctcaccttcatgcgcacgacggcgacgtcacgtagcttcttgacatccatggcgtcggggcatggtaagcggcggtggcaagatgcgagcaacgaggtgagccgcggtggcgacgtgatcacaagtgctagaggtgagatacgcagcagcccacgatggttcaatgtctatctcggaaggaagggttacatgcgattggaggtgaagcgacacacgtttaatgagtttgcattcatcaaggggtatattggtatatagtgacatctcagaagccaaaaacataaacgatttacgttaattcaaaacgtcaattaaaatgaaaccggagggaatactatataacattcaacttagaattgaatttgtgctataaatttaaatttggatttgtgcaaaagagtaaagtacatgaacgatctctaaatttgcattttattctttacgaaatttcactcggtctcaatgatgacaacaatataatatatattatatcggaacgttcgtacgctttactctttacaaaatttcactctgatctcaaggtggtgaccatgctctcgcaaaaagagcgctacagtaagattccccatttcagcccctctttctcctagactccggcagcttgccaccggtgaaggaaggagagaggttgagcttctcttttatcctatttaaggtatagatctatcgcattcttcacgtttcttgagctaatctcgtagtattgtaaagatcaagggatccaccgtatccggttgcccttgtcctgcttgctttgaagatggatgaaatcattggttttttgctccaaagttttcttcatgctcgaaacctatcggtactactccaaagccatcttatgggagtgtgccaaatatccctaagaaaaggttgtgctgaccgttcgtttcttctctggctatggatttgcttcagcttcggtcttcctcattggctccgatggtggacataccatgtgtggctgttctttttttcttcttgcggacacctcaacctccctagagaggccccatttgggttcatactgaggcatgattttctgcagctcacagtgatatccttgctttcacgtcgttgtgtgcatcgattaggctatcatcattgtggactgagcatagcaaaggactcgattgcttttctatttcttgttaggtcatgctttacataatcccgagtctatatgtaacttttccatctttgaaaggcttttacgtaaaactagttatactcccaatttctttatatataaattttgaggcagtagtcttccttggagtagggtaaatagtaaagtagttagttgactccaattatacccaactcatctataactcactttgtagcctgtatattcaacaactagttatattgttgggctctacacacttcacatcattattaaaatattgcagcattgatccatgctgcaacagcggcagagcaacatctctctcacacccaacgcttttgtctagagacgcgtgctacagtctggcgataaaattatcacccgctcacattctctcttaagctctttccttcttattagtattgcaatctacctacgtggacttaggtggcgtttggattcagggactaaactttagtccctgtgacatcggatgtttggacgctaatttggagtattaaacatagactaattacaaaactaattgcataaataagagctaatttgcgagacaaattttttaagcctaattaatctataattagcacatgtttactgtagcattacataggttaatcatggattaattaggctccatagattcgtctcgcgaattagcctagagttatggaatgggttttgtctttagtctatgtttaatacttctaattagtgtccaaacattcgatgtcacatggactaaattttaggcctggtttagtccctaaatttttttcccaaaaacgtcacatcgaatctttagacatatgcatggagcattaaatatagataaaaataaaaaataattacacagtttgcatcgaaaatcgtgagacgaatcttttaagcctaattagtctataattagccataagtattacagtaacccacatgtgctaatgacggcttaaaagattcgtctcgcggtttctaggcgaattataaaattagtttttctatttgtgtcaaaaacaccttgcgacatcggttaaacatccgatgtgacgtttaaaaattttcttttcggaaactaaacaggcgcttagtggtatcgtgtattattgtaacggagtaaaatctcaacggtgacaacggtgctgcatatctgtcactggaacgaggcacacgtcagaagcactcccaaattccagaaaccgtttcctcttctcggcgcggccacctcgattaactcaactcaaatataaaaaaaaactcttctacccgccggattttcctccgctccccaccaccacaaccatccttccccccactgacacgtcggcccccatcgagacaccgaccccacccgtcagccaccgtacccgacagccacgtgctcccccttcgctaaccccaccctgccagctatccccacgacgtcgaccgcccatccaccaccccaccaccgtgtgcgcctagcattattgttttttcctttttttttcttttctttttctctcttccccattcgccttcctccaaaaccccattcgcttcgctcctcctcgtcgtcgtcgccgccgccgctgccgctcgccgtagttagtatccgcgcggtgaggatggcggaggaggaggaggagaagaggaggttgggggagggggaggggggtggggtgatgagggacgcgaggaaggacggggtggtgagggaggtgatacggatggagagggaggcggtcatccccgtgctcaagcccaagctcgtcatgaagctcgcctacctcatcggtgagtagtagaacccatcgcccggccgccctctcactgatcaagcattcgttgagtcgagttcagttcagtgctccgtggtgtgatttttttgtttcctactactagatgttttctgcgggcgtatgaactcgaattcccagcgaggctaaactttttttttttggcgagtagcgcctctgcggttagagtgcctgccgctgcaatcgtgttacagtctgcacgacgctggcatatgatatgtttggttgaaattgggggcatgtgtcaatatcataggaataatggaatgcgatttggatgatgacgcagagtctataggcgtgaagatcttgttgaattgataatgatgcgaccattttttttttcaacttttggtttatgctaatggaatgtatggaaaagaactgtaatcttagaaattctttccatattcattaaattttgtgcaattcatggtcagagcatgatttggaccgttctgagttcttgaagctatgtaagaagatcgagtacaccatccgagcttggtatcttctccaattcgaggatttaatggtaggcctcttgtgttcattcccccctctccccccaattttgttctgttctttaggatcatttttatagtacaaactaattctagcctgactatcaactctattatgcagcaatttttacttcctgtttgatcatgtttctattgggtccagcaattgtatgctatgtttgatcctgtttctttcatgcagcaattgtattctctgtttgatcctgtttctggcgagaagaggctggagcagcagaacctgacacctgaagagattgaaactctggagttcaatttcatgacatatcttttccaggttgatccactaaatatgcatatatactatggaaatcatatataggctgctcctgtttgatgcatatgcaatcactgatttctcatggtgaacatgtcaaagaaccccttggaaggatagtcgaagtcaaatgtgtgatattccaaatggtgcttgcaaacattgcttctggcatgaagcttatgaccatgcttcttttttcttttttattgaatcggctctctctctctctctctctctctcggcatgggaactttggaagatttgaatttgtacccaaatggcctttcactattgaattggacaagattgatttgttatccttcccgtgttcagtacatcagt

SEQ ID NO: 2 - DNA, 783 bp, Oryza sativa
atggagacgacggcggcgaagaagctgccgccggggttcaggttcaggcccaccgacgaggagcttgtggtgcactacctccgccgccgcgcgctcggctcccctctcccgcccgccgtcgacatccccgatgtccgcctcctcgcgcatgacccctccgacctgcttcctccagggtggagtgagcaggagaggtacttcttcacgtgcaaggaggccaagtatgtcaaggggcgccgcgccaaccgcgccacgggcgccgggtactggaaggcgacggggaaggagaagccggtggcggtgtccgtggcggcggcgccgaggagccaggccgccgccgtcgtcgtcggcatgaagcgctccctcgtgttctaccgcgggaagccgccgaccggcaagaagacggactgggtcatgcacgagtaccgcctcgccggcgccggcctcgccccgtgccgccgcgccgccaccgccgaccacccggcgcgccccgccgagggctgggtgctctgccgcgtgttccggaagaaaggctccgcggccgcgtcgacagccagccccaccgccgacgccgacgacgacgacgccaccacggagcgcgccgacgacgccgcggcgggcgtccggttcatcgacttcttcgcccgcgccgacgcgcggcggcgccgcgcggcgtcgccggtgtcgtcgagctgcgtgacggatgcgtcggcggagcattgcagggagcaggagacgacgagccggaacggcggcgccgccgccggcgacgcctccgactaa

SEQ ID NO: 3 - DNA, 2115 bp, Oryza sativa
atgctgtcctaccgctggatcctgctactctcagtcgtcgtagttgtcgccgttgctgcggagctcccgcttgcgtcaaccaccttcaaaaccttgacgggtaatgctcctcttgttattgctagaggtggcttttcaggattgtttcctgattccagccaattcgcctttggttttgccttgtctgctacctcgactgacacaagcttgtggtgcgatgtgcaactgacgaaagacggtgttggcttttgcctccgagatttacttatgcagaatggcaccactatcagccaagtttatccaggggggaagcagacatacagaatcaatggagtgccgaaaaccggatggttccctgtggactataacatgtctttgctgacaaatcatgatgttttctacacagagcatggtttgaacatgacaaattacattctttcagtacagaagcttggctttgtgaagtacatctcatcacctgaactaggtttcctggaaactctatcaggaggcattgatcataaagtgaagctagtattccgctttcttgataaagctgtttccgatctttctacaaacaaaacatatgactctatgctgagtgacctggcatttattaagacaattgcttctggtataatggttcccaaaagctatatctggccagtgacgagtgataactatattcagcttcccacacagattgtcaaagatgcgcacgatgcaggtttagaaatatatgcgtctgatttttcaaacgatggaatttttccctataactacagttatgatcctttggaggaatatctgtcatttgtcagcaatggtggcttctctgttgatggtgtattaacggatcacccacttactgcatcagaggctattgggaatatattaattatctcacataatggtgctagtggagattacccggactgtacggatcttgcttatgagaaggcagttggagatggtgcagatgtcattgactgttccatcgaaatgaccaaagatggaattcctatatgcatgagttccattaacctgtatgatagtacagatgttcagaactcgaagtttagctcacttgcttctgtcgttccagaaattcagactaaaccgggaatattcacgtttaacctcacttgggaagaaattagcactttgagaccgaaaataacccacccatatcatgattttgtaaggaacccaaggtacgcaaatcaaggaaagtttttcaagttatccgactttttgacatatgcaaaggacaaggatttatccggcatcatgatcatcatgaagaatgctgcatttatggcaaaatcattaggatttgatgtcgttgatcttgtaacaactgcgttgagtaatgctggctatgacaacatggacccaactaccaagaacaacaaggagattatgattcagtctaaagacagtgctgttctcgtcaaactgaagcagaggttaacacaatgcaagcttgtctactcgctcccgttaaaagttggggacgtttctgattcctgcgtagcagatatcaagaagtttgcagatgctgttattgttgacagggaatctgtttttgccgagagcaaaggttttattattaggaaaagcaaggttgtggaagatgtgcagtctgcagggttagctgtgtatgtggaggtattccgcaatgagtatgtatcaccaccggtggatttcttcgcagatggaacagtggagatcaacaactatgttcagttggttcatgttgatggcttcataactgacttccccaagactgttagaagatacaaaatgaatacttgtacacgccaaggagatggtacgtctacatccatgaagcaagtgccaattggcgacctggcgcagctactcgatgcggagtgcagtactggtggcatgctgccagctctggcaccaatgccggtgctcaactcatcggacgtcattgagccacctctccctgctgccgagcccaagagtgcagcaggtagctctgccaccaatgcttgtgttgtaggagtacttgctcctcctcccctcttcagcagcagcagggagtacgttcttctggccacgctgctgctactccagatgctgtaa

SEQ ID NO: 4 - DNA, 1113 bp, Oryza sativa
atgaccaaagatggaattcctatatgcatgagttccattaacctgtatgatagtacagatgttcagaactcgaagtttagctcacttgcttctgtcgttccagaaattcagactaaaccgggaatattcacgtttaacctcacttgggaagaaattagcactttgagaccgaaaataacccacccatatcatgattttgtaaggaacccaaggtacgcaaatcaaggaaagtttttcaagttatccgactttttgacatatgcaaaggacaaggatttatccggcatcatgatcatcatgaagaatgctgcatttatggcaaaatcattaggatttgatgtcgttgatcttgtaacaactgcgttgagtaatgctggctatgacaacatggacccaactaccaagaacaacaaggagattatgattcagtctaaagacagtgctgttctcgtcaaactgaagcagaggttaacacaatgcaagcttgtctactcgctcccgttaaaagttggggacgtttctgattcctgcgtagcagatatcaagaagtttgcagatgctgttattgttgacagggaatctgtttttgccgagagcaaaggttttattattaggaaaagcaaggttgtggaagatgtgcagtctgcagggttagctgtgtatgtggaggtattccgcaatgagtatgtatcaccaccggtggatttcttcgcagatggaacagtggagatcaacaactatgttcagttggttcatgttgatggcttcataactgacttccccaagactgttagaagatacaaaatgaatacttgtacacgccaaggagatggtacgtctacatccatgaagcaagtgccaattggcgacctggcgcagctactcgatgcggagtgcagtactggtggcatgctgccagctctggcaccaatgccggtgctcaactcatcggacgtcattgagccacctctccctgctgccgagcccaagagtgcagcaggtagctctgccaccaatgcttgtgttgtaggagtacttgctcctcctcccctcttcagcagcagcagggagtacgttcttctggccacgctgctgctactccagatgctgtaa

SEQ ID NO: 5 - DNA, 1971 bp, Oryza sativa
atgcagaatggcaccactatcagccaagtttatccaggggggaagcagacatacagaatcaatggagtgccgaaaaccggatggttccctgtggactataacatgtctttgctgacaaatgtttttttaacacaggcacttttttctcgtaccgacaaatttgatttctgcaacttccgcatcttttctgtcaccggcttcatgtcctcgatcgagccatcatctctttggttgaatgttgagcatgatgttttctacacagagcatggtttgaacatgacaaattacattctttcagtacagaagcttggctttgtgaagtacatctcatcacctgaactaggtttcctggaaactctatcaggaggcattgatcataaagtgaagctagtattccgctttcttgataaagctgtttccgatctttctacaaacaaaacatatgactctatgctgagtgacctggcatttattaagacaattgcttctggtataatggttcccaaaagctatatctggccagtgacgagtgataactatattcagcttcccacacagattgtcaaagatgcgcacgatgcaggtttagaaatatatgcgtctgatttttcaaacgatggaatttttccctataactacagttatgatcctttggaggaatatctgtcatttgtcagcaatggtggcttctctgttgatggtgtattaacggatcacccacttactgcatcagaggctattgggaatatattaattatctcacataatggtgctagtggagattacccggactgtacggatcttgcttatgagaaggcagttggagatggtgcagatgtcattgactgttccatcgaaatgaccaaagatggaattcctatatgcatgagttccattaacctgtatgatagtacagatgttcagaactcgaagtttagctcacttgcttctgtcgttccagaaattcagactaaaccgggaatattcacgtttaacctcacttgggaagaaattagcactttgagaccgaaaataacccacccatatcatgattttgtaaggaacccaaggtacgcaaatcaaggaaagtttttcaagttatccgactttttgacatatgcaaaggacaaggatttatccggcatcatgatcatcatgaagaatgctgcatttatggcaaaatcattaggatttgatgtcgttgatcttgtaacaactgcgttgagtaatgctggctatgacaacatggacccaactaccaagaacaacaaggagattatgattcagtctaaagacagtgctgttctcgtcaaactgaagcagaggttaacacaatgcaagcttgtctactcgctcccgttaaaagttggggacgtttctgattcctgcgtagcagatatcaagaagtttgcagatgctgttattgttgacagggaatctgtttttgccgagagcaaaggttttattattaggaaaagcaaggttgtggaagatgtgcagtctgcagggttagctgtgtatgtggaggtattccgcaatgagtatgtatcaccaccggtggatttcttcgcagatggaacagtggagatcaacaactatgttcagttggttcatgttgatggcttcataactgacttccccaagactgttagaagatacaaaatgaatacttgtacacgccaaggagatggtacgtctacatccatgaagcaagtgccaattggcgacctggcgcagctactcgatgcggagtgcagtactggtggcatgctgccagctctggcaccaatgccggtgctcaactcatcggacgtcattgagccacctctccctgctgccgagcccaagagtgcagcaggtagctctgccaccaatgcttgtgttgtaggagtacttgctcctcctcccctcttcagcagcagcagggagtacgttcttctggccacgctgctgctactccagatgctgtaa

SEQ ID NO: 6 - DNA, 1272 bp, Oryza sativa
atggagtgcttggccgagatgccgcgcgcgccgctggccgaccgccgcccgcggaagaggcagcggctggggtgggacgtcggccccgagatccaccaggttcagatagggttatgtgggcaagaagttgcaaatgtcatcagtgctgtgacgctgggtctctcgtcccaggaaatccctcgttttgcttcccctcctctgagagaagatgacaaggatggacactttgtctttgctgttggagacaacctcacaccacgatacaggattaatgcaaaaatgggtgaaggtacctttggtcaggtattggaatgttgggatagggaaaggaaagaaatggtggccattaagatcatcagaggcattaagaagtacagggatgctgcaatgatagaaattggcatgctcgagcagcttggtaaatatgaaaaaagtagatccagttgtgttcaaattcggaactggtttgactatcgtaaccatatctgtattgtctgtgagaagcttggaccaagcttatatgattttctgcggaaaaacagttaccgctcattcccaattgccctagttcgggaggttgccaaacaactgttggaatgtatagcatttatgcatgaattgcgcctcattcacactgatttaaagcctgagaacattcttcttgtttctccagagtacattaaagtgcccgattacaaagtttcatcccgttctccaaaggaaggttcctatttcaagcagctgcccaagtccagtgctattaaggtgattgattttggcagcacaacatatgaccagcaggatcagacctatgtggtgtctactaggcattatcgagctccagaagttatcttgggacttggatggagttacccctgtgatatatggagtgttggttgtatactggttgagctatgcacgggagaagcattgtttcagacccatgaaaacttggagcatcttgctatgatggagagggtatttggtcctttgccatgtcacatgctcaaaagggcagaccggcattccgagaaatatgtcagaaaaggccgtttaaactggcctgaaggttgtgcgtcacgggatagcatgaaagctgttatgaagctgccacgtcttcagaatctggtgatgcaaaatgtagatcattctgggggcgagttcattgaccttttgcaaggtctgttaaggtatgatccagctagccgcctaacagcacaagaggcgcttaggcatccattcttgagggagcagtccgagcgaagaagatga

SEQ ID NO: 7 - DNA, 873 bp, Oryza sativa
atggagtgcttggccgagatgccgcgcgcgccgctggccgaccgccgcccgcggaagaggcagcggctggggtgggacgtcggccccgagatccaccaggttcagatagggttatgtgggcaagaagttgcaaatgtcatcagtgctgtgacgctgggtctctcgtcccaggaaatccctcgttttgcttcccctcctctgagagaagatgacaaggatggacactttgtctttgctgttggagacaacctcacaccacgatacaggattaatgcaaaaatgggtgaaggtacctttggtcaggtattggaatgttgggatagggaaaggaaagaaatggtggccattaagatcatcagaggcattaagaagtacagggatgctgcaatgatagaaattggcatgctcgagcagcttggtaaatatgaaaaaagtagatccagttgtgttcaaattcggaactggtttgactatcgtaaccatatctgtattgtctgtgagaagcttggaccaagcttatatgattttctgcggaaaaacagttaccgctcattcccaattgccctagttcgggaggttgccaaacaactgttggaatgtatagcatttatgcatgaattgcgcctcattcacactgatttaaagcctgagaacattcttcttgtttctccagagtacattaaagtgcccgattacaaagtttcatcccgttctccaaaggaaggttcctatttcaagcagctgcccaagtccagtgctattaaggtgattgattttggcagcacaacatatgaccagcaggatcagacctatgtggtgtctactaggcattatcgagctccagaagttatcttgggtatttgtcttgcctag

SEQ ID NO: 8 - DNA, 873 bp, Oryza sativa; identical to SEQ ID NO: 7

SEQ ID NO: 9 - DNA, 1137 bp, Oryza sativa
atggaggagcactacaccatgaagaagccgaggttgcttcttctttccttggaggtgatactgattgctcttcttcttcctctccgtggtgcacattgtgagagctctactcaaggtgaaggcggcggtggcggcgccggcgccggcgcggcgaacctgacggtgaccggcacggtgttctgcgacgcctgctcctccagctccttctccaaccacagctacttcttgccaggtgtcaaagtgagaatcgactgcatgatcagcgtgaaatcggcgtccaaggaggagatcaagatcaccgccgagaaggtgaccaacaccttcggcgcgtaccagctcgacatcccggcgatcgacggcttcgagtgcgccacctccgccgccgccgccgccgactccttctgccgcgccgccgtcatcgacaacccctcgccgctctgcaacgtgccggcggtcaccaccaccgtcggccacatctcctcctcctcctccggccacgaccacgaccagcccaacgcctgcctctacaacctcaactccctctactaccgccccggcggcgccaagaacggcggccagtgcggcggcaccggcggcggaggcgacgtgccccccgccgcgctgaacacgtcgctgttctactgcccgccgtggccgtggccgccgatcccgttctgcacgccgcgcccgtggttcccgcccatcccgttcctcacgccgccgccgccgccgttcctcccgttcccgctcccgccgatcccgttcctcacgccgccgtcgccgccgccgccggcgttcccgttcccgctcccgccatggccgtgggcgccgccgccggcgttcccgttcccgcacctcccgccaatcttctcgccgccgtcaccgcccccgccgccgccaccggcgttcccgttcccgttcccgcagctgccgcctctcccgcacttcccaccgctgccatcattctacccatcgccacctccgcctccgccgccgccgccgccaccgccgccatcgttcccgtggccgttcccgccattggcgccgcttttcccgccatatccatctcctccaccgtcgatgtattctcgcaaagatccgagcacttggtcgtcgtcttccaaacagcagccatga

SEQ ID NO: 10 - DNA, 891 bp, Oryza sativa
atggctggcctgtccctgcagcatccctgggcttttgccttcggcctccttggcaacctcatatccttcacgacctatctggcaccaatcccgacgttctaccggatctacaagagcaagtcgacggaggggttccagtcggtgccgtacgtggtggcgctcttcagcgccatgctgtggatcttctacgcgctgatcaagtccaacgaggccctcctcatcaccatcaacgccgccggttgcgtcatcgagaccatctacatcgtcatgtacctcgcctacgcccccaagaaggccaaggtgttcacgacgaagatcctgctgctgctgaacgtgggggtgttcggggtgatcctgctgctgacgctgctgctctcccatggcgagcagcgcgtcgtctccctcggctgggtctgcgtcgccttctccgtcagcgtctttgtcgcgccgctcagcatcatcaagcgagtgatccagtcgaggagcgtggagtacatgcccttctccctctccctcacgctcaccctcagcgccgtcgtctggttcctctacggccttctcatcaaggacaaatacgtcgcgcttcccaacatcctgggcttcacattcggtgtggtccagatggggctctacgtgttctacatgaacgcgacgccggtggccggcgaggggaaagaagggaaggggaagctggcggcggcggaggagctccccgtcgtcgtcaacgtcggcaagctcgccgccgccacgcccgacaggagcaccggcgccgtgcacgtgcacccagtcccgaggagctgcgcggcggaggcggcggcggccgagccggaggtgctcgtcgacattccgccgccgccgccgccgcgcgccgtcgaggtggccgccgtgtag

SEQ ID NO: 11 - DNA, 951 bp, Oryza sativa
atgagaggattgcaggccgccgtgctgttcacggcggtggcggcggcggcggcgccgacgaactgcaccacccgctgcggcgacatcagcttcgagtacccgttcggcgtggagcccggctgctaccacccaggcttcaacctcacctgcagcagcaacgacaccaggctgttcatgggcgacggcaccgtgcaggtgctcgacatctccatccccaactccaccttgcgcgtcaacgccaccgccatggcgttcgaccccgccgacgacgtgcagcgcggcgtcatcaacgcgacgacgacatggcgcgccgccgccgccgccgacgacgacgggggcccgttcgtcgtgtcgaggcgcaacacgatcgcgctgatgggatgcaacgcccgcgtcgacctccgcggcggagaccgccgccacagcgacaacctggtcagctcctgcaccgccgtctgcccaccggtcggcggcggcgacgacgccgcggctcacgacgacggcgacggcggcgacggccacaccatcgcgatcatcgacgcctggaacggcaagtgctccggcgtcggctgctgccaggcaaacatcatgctgggctacccttcctacaccatccagatcaagcagctgcaggagaagaacctccatagcttcgacttccagtacatcgcctacatcacggacgagacgctgaatttcacggaagagatcgccggccgcatcgccactccggcggcgctcccggccacgctagactttgtgatcagaagcaactcgtcgtgttcgacgccggcgaactcgacggccggcggcgagtgccgcagcgaacacagcttttgtgaggattacaagggtggtggtaataccctccttgggtatagctgcgtctgctcggagggttaccgaggaaatccctacgttgctggtggatgccatgagcttaattgctaa

SEQ ID NO: 12 - DNA, 735 bp, Oryza sativa
atggacgtgttcgtcaccaccgccgaccccgacggcatagcagcgcttgacgatgacgcgctgctcccggcgatggacgtgttcgtcaccaccgccgaccccgacaaggagccgccgctcgccacggcgaacaccgtgctgtccatatatcctcgccgcgggctaccccgccggcaagttgtgcaggtactgatcgattctgctgggagcgtgccacagctcggcgttgcggacgggagcaagctcatcgacgtcgcctctgtcgacgtgtgcctcccggcgcttgtgtacgtgtgccgcgagaagcgccgcggccacgcgcaccaccggaaggcgggcgccatgaacgcgcccttcatcctcgacctcgactgcgaccactacgtcaacaactcgcaggccctccgcgccggcatctgcttcatgatcgaacgcggcggcggcggagccgccgaagacgccgtcgcggtcgcgttcgtccagttcccgcagcgggtcgacggcgtcgatcccagcgaccgctacgccaaccacaaccgcgtcttcttcgactgcaccgagctcggcctcgacggcctccagggccccatctacgtcggcaccggctgcttgttccgccgtgtcgcgctctacagcgtcgacctgccgcgctggagaccgcggcgttcattgggctgtcgcctactcggagaagacgagcggctatggtccaggttgaaacaaatggtaatatga

SEQ ID NO: 13 - DNA, 897 bp, Oryza sativa
atggacggcaaggactccaccaccacccccgcccctgccccggctccggctccggctccggcgccggcggcagagcctcagacgacggggaacgcgccgccgccgccgccgcagcagcagcagcagcagccggaggcggcgaagtgggggacgaggcagatgggcccgccggcggcgcccggggcgcacccggagaaccagcaggcggcgcggtggacggcggcgaggggcgaccaggagctcccgccctacgtcatcatgggcgaggcggcggcggcgccgccgcgggggcggccggagagaggggacagcccgatggagcacatcctcgacttcttcaacacctggagccgcaaggccgaggagctcgcctccaacatctggttcaacctgaagacggcgccgtcgatgtcggacgcggcgatggggaagctgagcctgggagcgaaggccctcagcgagggcggcttcgacaagctctacaagcagacgttcgccggcgccggcgccgacgagcggctgaggaagacgttcgcctgctacctctcgacggcgacgggccccgtcgccggcacgctgtacctgaccgaccggagcgtcgcgttctgcagcgaccggccgctctccttcgcggcgccctcggggcagacggcgtggagctactacaaggtgatgatcccggtggccaaggtcgccgccgccgagccggtgacgatgaaggagagcccgccggagaagtacgtgcacgtcgtgacggtggactcgcatgacttctggttcatggggttcgttagctatgacaaggccgtgcaccacctcgtccaggccgtctcctcccagcaacgtggcggcgccgccgctgacacggccgccgccgtccccggagacggcaagtga

SEQ ID NO: 14 - DNA, 2526 bp, Oryza sativa
atggctgctgcagcgacggcggcggcctcgccggttgaggggctcaccggcggcggcggcggtggtggtggaggagtggacgggctgttcgtggagctgtggcgcgcgtgcgcggggccgctggtgacggtgcccgccgtcggggagagggtcttctacctcccgcagggccacatcgagcaggtggaggcatcgacgaaccaggtcgccgagcagcagggggctccgctctacaatctgccatggaagatcccgtgcaaggtcatgaacgtcgagctcaaggctgagcctgatacggatgaggtgtatgcgcagctcaccctgcttccggagaagcagcaggatgggaatgggagtggtaacgggaatgtgtccaaagacaaggtggaggaggaagaggtggtgccaccagctgcaactgagcggccccgggtgcactccttctgcaagacgctcactgcgtcggacacgagcacgcatggtggcttctcggtgctgcgccggcacgcggatgagtgcctcccaccactggatatgagtcagcatcccccaacacaagagctggtggccaaggatcttcatggggttgagtggcgcttccgtcacatcttccgaggtcagccacgaagacaccttctccagagtggttggagtgtttttgtgagtgccaaacgccttgttgctggagatgccttcatatttctcagaggtgagaatggggaactacgagttggagttcggcgtgcaatgagacaacaagctaatattccatcttcggtcatatcaagccacagtatgcatcttggtgttcttgcaactgcatggcatgcagtgaacactggaaccatgttcactgtgtactacaagccaaggactagtccatctgaatttgtggtaccacgtgatctgtacaaggaatctctgaaacgaaatcattcaatagggatgagattcaagatgacatttgaaggcgaagaggctgcagagcaaagattcactggcacaattgttggagtaggtgattctgacccatctggttgggctgactcaaaatggcgttcccttaaggtgcgatgggatgaagctgcttctgttcctcgtcctgatagggtttctccttggcaaatagaacctgctaacagcccttcccctgtcaaccctcttccagcaccccgaaccaagcgggctcgtccaaatgttttagcttcctcacctgacttgtctgctgtaaacaaagaagttgcttcaaaagtcatggcaaactcgcagcaaaatggtcttccaagggccttccacagtcaagaaaacatgaatttgagaagtcgttttggtgatagcaatgagctaaatacttcccaaaagcttaccatgtggtcttcaggaagcaatcaagagaaaaataatgtttctgtccagagggagctaggttcacagagttggatgcagatgagaaggcctgatggttcctctgagatattatctggatttcaaccactgaaagatacgcggaaccctctgagttcatttcctagtcagatatctggaaaccgttcaaatacgtggaacacaatcaatgttcattatcccgaccaaaatgccaatcataatatgtaccctggcacatggtctcttatgcctccaaacactggttttggtgtgaatcagcagaactacctaatgacgcctgacatcacactccctcaaaggtctcttaatgccaagtttggtgggaatggagcattcacttcgcttcgggcccatggcatagatcagcgctcctctggttggcttgggcatattgagccaagttctcacattgatgatgcctcatcgagtcttatcaagccacagcctttggttattgatcacaatgttcagaaagctaaaggctcttcatgcatgctatttgggatttctcttgacagccctgcaaaacctgaactattgatatccccaccaagtgttgcatttgatgggaagctccaacaggatgcacttgaagaggatgaatgctctgatccttccaagactgtgaagccacttgatggagctcagcacgattctgctagagagaaacatcagtcatgtccagatggtaccaaaaacattcagagtaaacagcaaaatggttcctcccgaagttgcaagaaggtccacaagcaaggaatcgcactcgggaggtcaatagatcttacaaagttcacttgctatgatgagttgattgctgaactggaccagatgtttgacttcaatggtgagctgaacagttcaagcaagaactggatggtcgtttacactgataatgagggtgacatgatgttggttggtgatgatccttggaatgaattctgcaacatggttcataaaatcttcatctacacgagggaggaggtccagaagatgaatccgggtgccctaaactcaaggtcagaggatagccggtctacttccgtggaacgagggctagttggcgaagggctccaaggtggtctatccaccccatcactgaattctgagaactgctaa

SEQ ID NO: 15 - DNA, 2526 bp, Oryza sativa; identical to SEQ ID NO: 14

SEQ ID NO: 16 - DNA, 2523 bp, Oryza sativa
atggctgctgcagcgacggcggcggcctcgccggttgaggggctcaccggcggcggcggcggtggtggtggaggagtggacgggctgttcgtggagctgtggcgcgcgtgcgcggggccgctggtgacggtgcccgccgtcggggagagggtcttctacctcccgcagggccacatcgagcaggtggaggcatcgacgaaccaggtcgccgagcagcagggggctccgctctacaatctgccatggaagatcccgtgcaaggtcatgaacgtcgagctcaaggctgagcctgatacggatgaggtgtatgcgcagctcaccctgcttccggagaagcaggatgggaatgggagtggtaacgggaatgtgtccaaagacaaggtggaggaggaagaggtggtgccaccagctgcaactgagcggccccgggtgcactccttctgcaagacgctcactgcgtcggacacgagcacgcatggtggcttctcggtgctgcgccggcacgcggatgagtgcctcccaccactggatatgagtcagcatcccccaacacaagagctggtggccaaggatcttcatggggttgagtggcgcttccgtcacatcttccgaggtcagccacgaagacaccttctccagagtggttggagtgtttttgtgagtgccaaacgccttgttgctggagatgccttcatatttctcagaggtgagaatggggaactacgagttggagttcggcgtgcaatgagacaacaagctaatattccatcttcggtcatatcaagccacagtatgcatcttggtgttcttgcaactgcatggcatgcagtgaacactggaaccatgttcactgtgtactacaagccaaggactagtccatctgaatttgtggtaccacgtgatctgtacaaggaatctctgaaacgaaatcattcaatagggatgagattcaagatgacatttgaaggcgaagaggctgcagagcaaagattcactggcacaattgttggagtaggtgattctgacccatctggttgggctgactcaaaatggcgttcccttaaggtgcgatgggatgaagctgcttctgttcctcgtcctgatagggtttctccttggcaaatagaacctgctaacagcccttcccctgtcaaccctcttccagcaccccgaaccaagcgggctcgtccaaatgttttagcttcctcacctgacttgtctgctgtaaacaaagaagttgcttcaaaagtcatggcaaactcgcagcaaaatggtcttccaagggccttccacagtcaagaaaacatgaatttgagaagtcgttttggtgatagcaatgagctaaatacttcccaaaagcttaccatgtggtcttcaggaagcaatcaagagaaaaataatgtttctgtccagagggagctaggttcacagagttggatgcagatgagaaggcctgatggttcctctgagatattatctggatttcaaccactgaaagatacgcggaaccctctgagttcatttcctagtcagatatctggaaaccgttcaaatacgtggaacacaatcaatgttcattatcccgaccaaaatgccaatcataatatgtaccctggcacatggtctcttatgcctccaaacactggttttggtgtgaatcagcagaactacctaatgacgcctgacatcacactccctcaaaggtctcttaatgccaagtttggtgggaatggagcattcacttcgcttcgggcccatggcatagatcagcgctcctctggttggcttgggcatattgagccaagttctcacattgatgatgcctcatcgagtcttatcaagccacagcctttggttattgatcacaatgttcagaaagctaaaggctcttcatgcatgctatttgggatttctcttgacagccctgcaaaacctgaactattgatatccccaccaagtgttgcatttgatgggaagctccaacaggatgcacttgaagaggatgaatgctctgatccttccaagactgtgaagccacttgatggagctcagcacgattctgctagagagaaacatcagtcatgtccagatggtaccaaaaacattcagagtaaacagcaaaatggttcctcccgaagttgcaagaaggtccacaagcaaggaatcgcactcgggaggtcaatagatcttacaaagttcacttgctatgatgagttgattgctgaactggaccagatgtttgacttcaatggtgagctgaacagttcaagcaagaactggatggtcgtttacactgataatgagggtgacatgatgttggttggtgatgatccttggaatgaattctgcaacatggttcataaaatcttcatctacacgagggaggaggtccagaagatgaatccgggtgccctaaactcaaggtcagaggatagccggtctacttccgtggaacgagggctagttggcgaagggctccaaggtggtctatccaccccatcactgaattctgagaactgctaa

SEQ ID NO: 17 - DNA, 2523 bp, Oryza sativa
atggctgctgcagcgacggcggcggcctcgccggttgaggggctcaccggcggcggcggcggtggtggaggagtggacgggctgttcgtggagctgtggcgcgcgtgcgcggggccgctggtgacggtgcccgccgtcggggagagggtcttctacctcccgcagggccacatcgagcaggtggaggcatcgacgaaccaggtcgccgagcagcagggggctccgctctacaatctgccatggaagatcccgtgcaaggtcatgaacgtcgagctcaaggctgagcctgatacggatgaggtgtatgcgcagctcaccctgcttccggagaagcagcaggatgggaatgggagtggtaacgggaatgtgtccaaagacaaggtggaggaggaagaggtggtgccaccagctgcaactgagcggccccgggtgcactccttctgcaagacgctcactgcgtcggacacgagcacgcatggtggcttctcggtgctgcgccggcacgcggatgagtgcctcccaccactggatatgagtcagcatcccccaacacaagagctggtggccaaggatcttcatggggttgagtggcgcttccgtcacatcttccgaggtcagccacgaagacaccttctccagagtggttggagtgtttttgtgagtgccaaacgccttgttgctggagatgccttcatatttctcagaggtgagaatggggaactacgagttggagttcggcgtgcaatgagacaacaagctaatattccatcttcggtcatatcaagccacagtatgcatcttggtgttcttgcaactgcatggcatgcagtgaacactggaaccatgttcactgtgtactacaagccaaggactagtccatctgaatttgtggtaccacgtgatctgtacaaggaatctctgaaacgaaatcattcaatagggatgagattcaagatgacatttgaaggcgaagaggctgcagagcaaagattcactggcacaattgttggagtaggtgattctgacccatctggttgggctgactcaaaatggcgttcccttaaggtgcgatgggatgaagctgcttctgttcctcgtcctgatagggtttctccttggcaaatagaacctgctaacagcccttcccctgtcaaccctcttccagcaccccgaaccaagcgggctcgtccaaatgttttagcttcctcacctgacttgtctgctgtaaacaaagaagttgcttcaaaagtcatggcaaactcgcagcaaaatggtcttccaagggccttccacagtcaagaaaacatgaatttgagaagtcgttttggtgatagcaatgagctaaatacttcccaaaagcttaccatgtggtcttcaggaagcaatcaagagaaaaataatgtttctgtccagagggagctaggttcacagagttggatgcagatgagaaggcctgatggttcctctgagatattatctggatttcaaccactgaaagatacgcggaaccctctgagttcatttcctagtcagatatctggaaaccgttcaaatacgtggaacacaatcaatgttcattatcccgaccaaaatgccaatcataatatgtaccctggcacatggtctcttatgcctccaaacactggttttggtgtgaatcagcagaactacctaatgacgcctgacatcacactccctcaaaggtctcttaatgccaagtttggtgggaatggagcattcacttcgcttcgggcccatggcatagatcagcgctcctctggttggcttgggcatattgagccaagttctcacattgatgatgcctcatcgagtcttatcaagccacagcctttggttattgatcacaatgttcagaaagctaaaggctcttcatgcatgctatttgggatttctcttgacagccctgcaaaacctgaactattgatatccccaccaagtgttgcatttgatgggaagctccaacaggatgcacttgaagaggatgaatgctctgatccttccaagactgtgaagccacttgatggagctcagcacgattctgctagagagaaacatcagtcatgtccagatggtaccaaaaacattcagagtaaacagcaaaatggttcctcccgaagttgcaagaaggtccacaagcaaggaatcgcactcgggaggtcaatagatcttacaaagttcacttgctatgatgagttgattgctgaactggaccagatgtttgacttcaatggtgagctgaacagttcaagcaagaactggatggtcgtttacactgataatgagggtgacatgatgttggttggtgatgatccttggaatgaattctgcaacatggttcataaaatcttcatctacacgagggaggaggtccagaagatgaatccgggtgccctaaactcaaggtcagaggatagccggtctacttccgtggaacgagggctagttggcgaagggctccaaggtggtctatccaccccatcactgaattctgagaactgctaa

SEQ ID NO: 18 - DNA, 2262 bp, Oryza sativa
atgaacgtcgagctcaaggctgagcctgatacggatgaggtgtatgcgcagctcaccctgcttccggagaagcagcaggatgggaatgggagtggtaacgggaatgtgtccaaagacaaggtggaggaggaagaggtggtgccaccagctgcaactgagcggccccgggtgcactccttctgcaagacgctcactgcgtcggacacgagcacgcatggtggcttctcggtgctgcgccggcacgcggatgagtgcctcccaccactggatatgagtcagcatcccccaacacaagagctggtggccaaggatcttcatggggttgagtggcgcttccgtcacatcttccgaggtcagccacgaagacaccttctccagagtggttggagtgtttttgtgagtgccaaacgccttgttgctggagatgccttcatatttctcagaggtgagaatggggaactacgagttggagttcggcgtgcaatgagacaacaagctaatattccatcttcggtcatatcaagccacagtatgcatcttggtgttcttgcaactgcatggcatgcagtgaacactggaaccatgttcactgtgtactacaagccaaggactagtccatctgaatttgtggtaccacgtgatctgtacaaggaatctctgaaacgaaatcattcaatagggatgagattcaagatgacatttgaaggcgaagaggctgcagagcaaagattcactggcacaattgttggagtaggtgattctgacccatctggttgggctgactcaaaatggcgttcccttaaggtgcgatgggatgaagctgcttctgttcctcgtcctgatagggtttctccttggcaaatagaacctgctaacagcccttcccctgtcaaccctcttccagcaccccgaaccaagcgggctcgtccaaatgttttagcttcctcacctgacttgtctgctgtaaacaaagaagttgcttcaaaagtcatggcaaactcgcagcaaaatggtcttccaagggccttccacagtcaagaaaacatgaatttgagaagtcgttttggtgatagcaatgagctaaatacttcccaaaagcttaccatgtggtcttcaggaagcaatcaagagaaaaataatgtttctgtccagagggagctaggttcacagagttggatgcagatgagaaggcctgatggttcctctgagatattatctggatttcaaccactgaaagatacgcggaaccctctgagttcatttcctagtcagatatctggaaaccgttcaaatacgtggaacacaatcaatgttcattatcccgaccaaaatgccaatcataatatgtaccctggcacatggtctcttatgcctccaaacactggttttggtgtgaatcagcagaactacctaatgacgcctgacatcacactccctcaaaggtctcttaatgccaagtttggtgggaatggagcattcacttcgcttcgggcccatggcatagatcagcgctcctctggttggcttgggcatattgagccaagttctcacattgatgatgcctcatcgagtcttatcaagccacagcctttggttattgatcacaatgttcagaaagctaaaggctcttcatgcatgctatttgggatttctcttgacagccctgcaaaacctgaactattgatatccccaccaagtgttgcatttgatgggaagctccaacaggatgcacttgaagaggatgaatgctctgatccttccaagactgtgaagccacttgatggagctcagcacgattctgctagagagaaacatcagtcatgtccagatggtaccaaaaacattcagagtaaacagcaaaatggttcctcccgaagttgcaagaaggtccacaagcaaggaatcgcactcgggaggtcaatagatcttacaaagttcacttgctatgatgagttgattgctgaactggaccagatgtttgacttcaatggtgagctgaacagttcaagcaagaactggatggtcgtttacactgataatgagggtgacatgatgttggttggtgatgatccttggaatgaattctgcaacatggttcataaaatcttcatctacacgagggaggaggtccagaagatgaatccgggtgccctaaactcaaggtcagaggatagccggtctacttccgtggaacgagggctagttggcgaagggctccaaggtggtctatccaccccatcactgaattctgagaactgctaa

SEQ ID NO: 19 - skipped

SEQ ID NO: 20 - DNA, 1416 bp, Oryza sativa
atggcggcggcggcggcggtggctgacgaagtcaccgtgctccacggcggggtcgtcgtcagcatggacggcggcttccgcgtcttccaggacggcgccgtcgccgtcgccggggaccgcatcgccgccgtgggaccgtccgccgacgtcctctcgtccttccccggggccgcggcgacagtcgacctcgccggccgcatcctcctccccgggttcgtcaacacgcacgtgcacacgtcgcagcagctggcgcgggggatcgccgacgacgtcgacctgatggcgtggctgcacgggaggatctggccatacgagtcccacatgacggaggaggactcctacgcctccaccctcctctgcggcatcgagctcattcgatccggggtaacatgctttgcggaagcaggtgggcagtatgtttcagaaatggcacgtgcagtagagttgctgggattgcgtgcatgcttgacaaaatcaataatggattgtggtgatgggttacctccaaactggagctcttgttcaactgatgattgcattcagtcgcagaaagatctatacgaaaagcatcacaacacagctgatgggcgtatcaggatatggtttgggttgagacagatcatgaatgcaacggatcgtttactgcttgaaacaagagatgctgcacagaaactgaatactggaatccacatgcatattgcagaaataccctatgaaaatgagctggtaatgcagactaagggaattgatcatgggacagtgacatatttagagaaaattgattttctgaggagcaatttgctggctgctcattctgtttggttgaataagcctgagattgggcactttttaaaggctgatgttaaggtttctcactgccccgcatctgctatgaggatgttggggtttgctccaattagagaaatgctggattctggtgtttgtgtctctcttggtacagatggagcgccaagcaataacaggatgagcattgttgatgagatgtacctagcctgtcttattaacaaagggcgtgaggcgtacatcactggtacaacgaacccaactgctcttcctgcagagactgtattgaagatggctactattaatggtgcaaaagcagttctgtgggacgatgaaataggttcgctggaggttgggaagaaggcggacatggttgttgtgaatccacttatatggtccatggtcccagtgcatgactgcattgccaacatagtttactgcatgagaacagaaaatattgaatctgtaatgtgcaacggtcgatggattatgagggaaaagaagatcgtgaatttgaatgaggaggaggtaattgcttcagctgaaaaaatagcaagggaccttctagcgcgagctggcatcaacctacccaatcggatgaactacttgtga

SEQ ID NO: 21 - DNA, 1416 bp, Oryza sativa; identical to SEQ ID NO: 20

SEQ ID NO: 22 - DNA, 22 bp, Artificial Sequence
  Description of Artificial Sequence: Synthetic primer
ttcagccgatccattcaattcc

SEQ ID NO: 23 - DNA, 24 bp, Artificial Sequence
  Description of Artificial Sequence: Synthetic primer
gctattggccggaaagtagttagc

SEQ ID NO: 24 - DNA, 22 bp, Artificial Sequence
  Description of Artificial Sequence: Synthetic primer
gggacttgggaccagtttatgg

SEQ ID NO: 25 - DNA, 22 bp, Artificial Sequence
  Description of Artificial Sequence: Synthetic primer
tcaggtctgttggattccatgc

SEQ ID NO: 26 - DNA, 23 bp, Artificial Sequence
  Description of Artificial Sequence: Synthetic primer
gggaggacacctgtgtaagtagg

SEQ ID NO: 27 - DNA, 22 bp, Artificial Sequence
  Description of Artificial Sequence: Synthetic primer
ggttcaaatgagacccaattcc

SEQ ID NO: 28 - DNA, 21 bp, Artificial Sequence
  Description of Artificial Sequence: Synthetic primer
tgtgcggatgcgggtaagtcc

SEQ ID NO: 29 - DNA, 22 bp, Artificial Sequence
  Description of Artificial Sequence: Synthetic primer
ccacctgtcaaccaccgaaacc

SEQ ID NO: 30 - DNA, 24 bp, Artificial Sequence
  Description of Artificial Sequence: Synthetic primer
cagcagacgttccggttctactcg

SEQ ID NO: 31 - DNA, 21 bp, Artificial Sequence
  Description of Artificial Sequence: Synthetic primer
aggacggtggtggtgatctgg

SEQ ID NO: 32 - DNA, 21 bp, Artificial Sequence
  Description of Artificial Sequence: Synthetic primer
aacgaaagcgaagctgtctcc

SEQ ID NO: 33 - DNA, 22 bp, Artificial Sequence
  Description of Artificial Sequence: Synthetic primer
atttgttcccttccttcgatcc

SEQ ID NO: 34 - DNA, 23 bp, Artificial Sequence
  Description of Artificial Sequence: Synthetic primer
atggtagagacacaagtccatgc

SEQ ID NO: 35 - DNA, 22 bp, Artificial Sequence
  Description of Artificial Sequence: Synthetic primer
gacaaattggtgtaggtgaagg

SEQ ID NO: 36 - DNA, 22 bp, Artificial Sequence
  Description of Artificial Sequence: Synthetic primer
tgcttgcaaacattgcttctgg

SEQ ID NO: 37 - DNA, 24 bp, Artificial Sequence
  Description of Artificial Sequence: Synthetic primer
actgatgtactgaacacgggaagg

SEQ ID NO: 38 - DNA, 22 bp, Artificial Sequence
  Description of Artificial Sequence: Synthetic primer
cggcttagggagcgtctgtagg

SEQ ID NO: 39 - DNA, 26 bp, Artificial Sequence
  Description of Artificial Sequence: Synthetic primer
gcatgctagtatggccaccatattcc

SEQ ID NO: 40 - protein, 260 aa, Oryza sativa
METTAAKKLPPGFRFRPTDEELVVHYLRRRALGSPLPPAVDIPDVRLLAHDPSDLLPPGWSEQERYFFTCKEAKYVKGRRANRATGAGYWKATGKEKPVAVSVAAAPRSQAAAVVVGMKRSLVFYRGKPPTGKKTDWVMHEYRLAGAGLAPCRRAATADHPARPAEGWVLCRVFRKKGSAAASTASPTADADDDDATTERADDAAAGVRFIDFFARADARRRRAASPVSSSCVTDASAEHCREQETTSRNGGAAAGDASD

SEQ ID NO: 41 - protein, 704 aa, Oryza sativa
MLSYRWILLLSVVVVVAVAAELPLASTTFKTLTGNAPLVIARGGFSGLFPDSSQFAFGFALSATSTDTSLWCDVQLTKDGVGFCLRDLLMQNGTTISQVYPGGKQTYRINGVPKTGWFPVDYNMSLLTNHDVFYTEHGLNMTNYILSVQKLGFVKYISSPELGFLETLSGGIDHKVKLVFRFLDKAVSDLSTNKTYDSMLSDLAFIKTIASGIMVPKSYIWPVTSDNYIQLPTQIVKDAHDAGLEIYASDFSNDGIFPYNYSYDPLEEYLSFVSNGGFSVDGVLTDHPLTASEAIGNILIISHNGASGDYPDCTDLAYEKAVGDGADVIDCSIEMTKDGIPICMSSINLYDSTDVQNSKFSSLASVVPEIQTKPGIFTFNLTWEEISTLRPKITHPYHDFVRNPRYANQGKFFKLSDFLTYAKDKDLSGIMIIMKNAAFMAKSLGFDVVDLVTTALSNAGYDNMDPTTKNNKEIMIQSKDSAVLVKLKQRLTQCKLVYSLPLKVGDVSDSCVADIKKFADAVIVDRESVFAESKGFIIRKSKVVEDVQSAGLAVYVEVFRNEYVSPPVDFFADGTVEINNYVQLVHVDGFITDFPKTVRRYKMNTCTRQGDGTSTSMKQVPIGDLAQLLDAECSTGGMLPALAPMPVLNSSDVIEPPLPAAEPKSAAGSSATNACVVGVLAPPPLFSSSREYVLLATLLLLQML

SEQ ID NO: 42 - protein, 370 aa, Oryza sativa
MTKDGIPICMSSINLYDSTDVQNSKFSSLASVVPEIQTKPGIFTFNLTWEEISTLRPKITHPYHDFVRNPRYANQGKFFKLSDFLTYAKDKDLSGIMIIMKNAAFMAKSLGFDVVDLVTTALSNAGYDNMDPTTKNNKEIMIQSKDSAVLVKLKQRLTQCKLVYSLPLKVGDVSDSCVADIKKFADAVIVDRESVFAESKGFIIRKSKVVEDVQSAGLAVYVEVFRNEYVSPPVDFFADGTVEINNYVQLVHVDGFITDFPKTVRRYKMNTCTRQGDGTSTSMKQVPIGDLAQLLDAECSTGGMLPALAPMPVLNSSDVIEPPLPAAEPKSAAGSSATNACVVGVLAPPPLFSSSREYVLLATLLLLQML

SEQ ID NO: 43 - protein, 656 aa, Oryza sativa
MQNGTTISQVYPGGKQTYRINGVPKTGWFPVDYNMSLLTNVFLTQALFSRTDKFDFCNFRIFSVTGFMSSIEPSSLWLNVEHDVFYTEHGLNMTNYILSVQKLGFVKYISSPELGFLETLSGGIDHKVKLVFRFLDKAVSDLSTNKTYDSMLSDLAFIKTIASGIMVPKSYIWPVTSDNYIQLPTQIVKDAHDAGLEIYASDFSNDGIFPYNYSYDPLEEYLSFVSNGGFSVDGVLTDHPLTASEAIGNILIISHNGASGDYPDCTDLAYEKAVGDGADVIDCSIEMTKDGIPICMSSINLYDSTDVQNSKFSSLASVVPEIQTKPGIFTFNLTWEEISTLRPKITHPYHDFVRNPRYANQGKFFKLSDFLTYAKDKDLSGIMIIMKNAAFMAKSLGFDVVDLVTTALSNAGYDNMDPTTKNNKEIMIQSKDSAVLVKLKQRLTQCKLVYSLPLKVGDVSDSCVADIKKFADAVIVDRESVFAESKGFIIRKSKVVEDVQSAGLAVYVEVFRNEYVSPPVDFFADGTVEINNYVQLVHVDGFITDFPKTVRRYKMNTCTRQGDGTSTSMKQVPIGDLAQLLDAECSTGGMLPALAPMPVLNSSDVIEPPLPAAEPKSAAGSSATNACVVGVLAPPPLFSSSREYVLLATLLLLQML

SEQ ID NO: 44 - protein, 423 aa, Oryza sativa
MECLAEMPRAPLADRRPRKRQRLGWDVGPEIHQVQIGLCGQEVANVISAVTLGLSSQEIPRFASPPLREDDKDGHFVFAVGDNLTPRYRINAKMGEGTFGQVLECWDRERKEMVAIKIIRGIKKYRDAAMIEIGMLEQLGKYEKSRSSCVQIRNWFDYRNHICIVCEKLGPSLYDFLRKNSYRSFPIALVREVAKQLLECIAFMHELRLIHTDLKPENILLVSPEYIKVPDYKVSSRSPKEGSYFKQLPKSSAIKVIDFGSTTYDQQDQTYVVSTRHYRAPEVILGLGWSYPCDIWSVGCILVELCTGEALFQTHENLEHLAMMERVFGPLPCHMLKRADRHSEKYVRKGRLNWPEGCASRDSMKAVMKLPRLQNLVMQNVDHSGGEFIDLLQGLLRYDPASRLTAQEALRHPFLREQSERRR

SEQ ID NO: 45 - protein, 290 aa, Oryza sativa
MECLAEMPRAPLADRRPRKRQRLGWDVGPEIHQVQIGLCGQEVANVISAVTLGLSSQEIPRFASPPLREDDKDGHFVFAVGDNLTPRYRINAKMGEGTFGQVLECWDRERKEMVAIKIIRGIKKYRDAAMIEIGMLEQLGKYEKSRSSCVQIRNWFDYRNHICIVCEKLGPSLYDFLRKNSYRSFPIALVREVAKQLLECIAFMHELRLIHTDLKPENILLVSPEYIKVPDYKVSSRSPKEGSYFKQLPKSSAIKVIDFGSTTYDQQDQTYVVSTRHYRAPEVILGICLA

SEQ ID NO: 46 - protein, 290 aa, Oryza sativa; identical to SEQ ID NO: 45

SEQ ID NO: 47 - protein, 378 aa, Oryza sativa
MEEHYTMKKPRLLLLSLEVILIALLLPLRGAHCESSTQGEGGGGGAGAGAANLTVTGTVFCDACSSSSFSNHSYFLPGVKVRIDCMISVKSASKEEIKITAEKVTNTFGAYQLDIPAIDGFECATSAAAAADSFCRAAVIDNPSPLCNVPAVTTTVGHISSSSSGHDHDQPNACLYNLNSLYYRPGGAKNGGQCGGTGGGGDVPPAALNTSLFYCPPWPWPPIPFCTPRPWFPPIPFLTPPPPPFLPFPLPPIPFLTPPSPPPPAFPFPLPPWPWAPPPAFPFPHLPPIFSPPSPPPPPPPAFPFPFPQLPPLPHFPPLPSFYPSPPPPPPPPPPPPPSFPWPFPPLAPLFPPYPSPPPSMYSRKDPSTWSSSSKQQP

SEQ ID NO: 48 - protein, 296 aa, Oryza sativa
MAGLSLQHPWAFAFGLLGNLISFTTYLAPIPTFYRIYKSKSTEGFQSVPYVVALFSAMLWIFYALIKSNEALLITINAAGCVIETIYIVMYLAYAPKKAKVFTTKILLLLNVGVFGVILLLTLLLSHGEQRVVSLGWVCVAFSVSVFVAPLSIIKRVIQSRSVEYMPFSLSLTLTLSAVVWFLYGLLIKDKYVALPNILGFTFGVVQMGLYVFYMNATPVAGEGKEGKGKLAAAEELPVVVNVGKLAAATPDRSTGAVHVHPVPRSCAAEAAAAEPEVLVDIPPPPPPRAVEVAAV

SEQ ID NO: 49 - protein, 316 aa, Oryza sativa
MRGLQAAVLFTAVAAAAAPTNCTTRCGDISFEYPFGVEPGCYHPGFNLTCSSNDTRLFMGDGTVQVLDISIPNSTLRVNATAMAFDPADDVQRGVINATTTWRAAAAADDDGGPFVVSRRNTIALMGCNARVDLRGGDRRHSDNLVSSCTAVCPPVGGGDDAAAHDDGDGGDGHTIAIIDAWNGKCSGVGCCQANIMLGYPSYTIQIKQLQEKNLHSFDFQYIAYITDETLNFTEEIAGRIATPAALPATLDFVIRSNSSCSTPANSTAGGECRSEHSFCEDYKGGGNTLLGYSCVCSEGYRGNPYVAGGCHELNC

SEQ ID NO: 50 - protein, 244 aa, Oryza sativa
MDVFVTTADPDGIAALDDDALLPAMDVFVTTADPDKEPPLATANTVLSIYPRRGLPRRQVVQVLIDSAGSVPQLGVADGSKLIDVASVDVCLPALVYVCREKRRGHAHHRKAGAMNAPFILDLDCDHYVNNSQALRAGICFMIERGGGGAAEDAVAVAFVQFPQRVDGVDPSDRYANHNRVFFDCTELGLDGLQGPIYVGTGCLFRRVALYSVDLPRWRPRRSLGCRLLGEDERLWSRLKQMVI

SEQ ID NO: 51 - protein, 298 aa, Oryza sativa
MDGKDSTTTPAPAPAPAPAPAPAAEPQTTGNAPPPPPQQQQQQPEAAKWGTRQMGPPAAPGAHPENQQAARWTAARGDQELPPYVIMGEAAAAPPRGRPERGDSPMEHILDFFNTWSRKAEELASNIWFNLKTAPSMSDAAMGKLSLGAKALSEGGFDKLYKQTFAGAGADERLRKTFACYLSTATGPVAGTLYLTDRSVAFCSDRPLSFAAPSGQTAWSYYKVMIPVAKVAAAEPVTMKESPPEKYVHVVTVDSHDFWFMGFVSYDKAVHHLVQAVSSQQRGGAAADTAAAVPGDGK

SEQ ID NO: 52 - protein, 841 aa, Oryza sativa
MAAAATAAASPVEGLTGGGGGGGGGVDGLFVELWRACAGPLVTVPAVGERVFYLPQGHIEQVEASTNQVAEQQGAPLYNLPWKIPCKVMNVELKAEPDTDEVYAQLTLLPEKQQDGNGSGNGNVSKDKVEEEEVVPPAATERPRVHSFCKTLTASDTSTHGGFSVLRRHADECLPPLDMSQHPPTQELVAKDLHGVEWRFRHIFRGQPRRHLLQSGWSVFVSAKRLVAGDAFIFLRGENGELRVGVRRAMRQQANIPSSVISSHSMHLGVLATAWHAVNTGTMFTVYYKPRTSPSEFVVPRDLYKESLKRNHSIGMRFKMTFEGEEAAEQRFTGTIVGVGDSDPSGWADSKWRSLKVRWDEAASVPRPDRVSPWQIEPANSPSPVNPLPAPRTKRARPNVLASSPDLSAVNKEVASKVMANSQQNGLPRAFHSQENMNLRSRFGDSNELNTSQKLTMWSSGSNQEKNNVSVQRELGSQSWMQMRRPDGSSEILSGFQPLKDTRNPLSSFPSQISGNRSNTWNTINVHYPDQNANHNMYPGTWSLMPPNTGFGVNQQNYLMTPDITLPQRSLNAKFGGNGAFTSLRAHGIDQRSSGWLGHIEPSSHIDDASSSLIKPQPLVIDHNVQKAKGSSCMLFGISLDSPAKPELLISPPSVAFDGKLQQDALEEDECSDPSKTVKPLDGAQHDSAREKHQSCPDGTKNIQSKQQNGSSRSCKKVHKQGIALGRSIDLTKFTCYDELIAELDQMFDFNGELNSSSKNWMVVYTDNEGDMMLVGDDPWNEFCNMVHKIFIYTREEVQKMNPGALNSRSEDSRSTSVERGLVGEGLQGGLSTPSLNSENC

SEQ ID NO: 53 - protein, 841 aa, Oryza sativa; identical to SEQ ID NO: 52

SEQ ID NO: 54 - protein, 840 aa, Oryza sativa
MAAAATAAASPVEGLTGGGGGGGGGVDGLFVELWRACAGPLVTVPAVGERVFYLPQGHIEQVEASTNQVAEQQGAPLYNLPWKIPCKVMNVELKAEPDTDEVYAQLTLLPEKQDGNGSGNGNVSKDKVEEEEVVPPAATERPRVHSFCKTLTASDTSTHGGFSVLRRHADECLPPLDMSQHPPTQELVAKDLHGVEWRFRHIFRGQPRRHLLQSGWSVFVSAKRLVAGDAFIFLRGENGELRVGVRRAMRQQANIPSSVISSHSMHLGVLATAWHAVNTGTMFTVYYKPRTSPSEFVVPRDLYKESLKRNHSIGMRFKMTFEGEEAAEQRFTGTIVGVGDSDPSGWADSKWRSLKVRWDEAASVPRPDRVSPWQIEPANSPSPVNPLPAPRTKRARPNVLASSPDLSAVNKEVASKVMANSQQNGLPRAFHSQENMNLRSRFGDSNELNTSQKLTMWSSGSNQEKNNVSVQRELGSQSWMQMRRPDGSSEILSGFQPLKDTRNPLSSFPSQISGNRSNTWNTINVHYPDQNANHNMYPGTWSLMPPNTGFGVNQQNYLMTPDITLPQRSLNAKFGGNGAFTSLRAHGIDQRSSGWLGHIEPSSHIDDASSSLIKPQPLVIDHNVQKAKGSSCMLFGISLDSPAKPELLISPPSVAFDGKLQQDALEEDECSDPSKTVKPLDGAQHDSAREKHQSCPDGTKNIQSKQQNGSSRSCKKVHKQGIALGRSIDLTKFTCYDELIAELDQMFDFNGELNSSSKNWMVVYTDNEGDMMLVGDDPWNEFCNMVHKIFIYTREEVQKMNPGALNSRSEDSRSTSVERGLVGEGLQGGLSTPSLNSENC

SEQ ID NO: 55 - protein, 840 aa, Oryza sativa
MAAAATAAASPVEGLTGGGGGGGGVDGLFVELWRACAGPLVTVPAVGERVFYLPQGHIEQVEASTNQVAEQQGAPLYNLPWKIPCKVMNVELKAEPDTDEVYAQLTLLPEKQQDGNGSGNGNVSKDKVEEEEVVPPAATERPRVHSFCKTLTASDTSTHGGFSVLRRHADECLPPLDMSQHPPTQELVAKDLHGVEWRFRHIFRGQPRRHLLQSGWSVFVSAKRLVAGDAFIFLRGENGELRVGVRRAMRQQANIPSSVISSHSMHLGVLATAWHAVNTGTMFTVYYKPRTSPSEFVVPRDLYKESLKRNHSIGMRFKMTFEGEEAAEQRFTGTIVGVGDSDPSGWADSKWRSLKVRWDEAASVPRPDRVSPWQIEPANSPSPVNPLPAPRTKRARPNVLASSPDLSAVNKEVASKVMANSQQNGLPRAFHSQENMNLRSRFGDSNELNTSQKLTMWSSGSNQEKNNVSVQRELGSQSWMQMRRPDGSSEILSGFQPLKDTRNPLSSFPSQISGNRSNTWNTINVHYPDQNANHNMYPGTWSLMPPNTGFGVNQQNYLMTPDITLPQRSLNAKFGGNGAFTSLRAHGIDQRSSGWLGHIEPSSHIDDASSSLIKPQPLVIDHNVQKAKGSSCMLFGISLDSPAKPELLISPPSVAFDGKLQQDALEEDECSDPSKTVKPLDGAQHDSAREKHQSCPDGTKNIQSKQQNGSSRSCKKVHKQGIALGRSIDLTKFTCYDELIAELDQMFDFNGELNSSSKNWMVVYTDNEGDMMLVGDDPWNEFCNMVHKIFIYTREEVQKMNPGALNSRSEDSRSTSVERGLVGEGLQGGLSTPSLNSENC

SEQ ID NO: 56 - protein, 753 aa, Oryza sativa
MNVELKAEPDTDEVYAQLTLLPEKQQDGNGSGNGNVSKDKVEEEEVVPPAATERPRVHSFCKTLTASDTSTHGGFSVLRRHADECLPPLDMSQHPPTQELVAKDLHGVEWRFRHIFRGQPRRHLLQSGWSVFVSAKRLVAGDAFIFLRGENGELRVGVRRAMRQQANIPSSVISSHSMHLGVLATAWHAVNTGTMFTVYYKPRTSPSEFVVPRDLYKESLKRNHSIGMRFKMTFEGEEAAEQRFTGTIVGVGDSDPSGWADSKWRSLKVRWDEAASVPRPDRVSPWQIEPANSPSPVNPLPAPRTKRARPNVLASSPDLSAVNKEVASKVMANSQQNGLPRAFHSQENMNLRSRFGDSNELNTSQKLTMWSSGSNQEKNNVSVQRELGSQSWMQMRRPDGSSEILSGFQPLKDTRNPLSSFPSQISGNRSNTWNTINVHYPDQNANHNMYPGTWSLMPPNTGFGVNQQNYLMTPDITLPQRSLNAKFGGNGAFTSLRAHGIDQRSSGWLGHIEPSSHIDDASSSLIKPQPLVIDHNVQKAKGSSCMLFGISLDSPAKPELLISPPSVAFDGKLQQDALEEDECSDPSKTVKPLDGAQHDSAREKHQSCPDGTKNIQSKQQNGSSRSCKKVHKQGIALGRSIDLTKFTCYDELIAELDQMFDFNGELNSSSKNWMVVYTDNEGDMMLVGDDPWNEFCNMVHKIFIYTREEVQKMNPGALNSRSEDSRSTSVERGLVGEGLQGGLSTPSLNSENC

SEQ ID NO: 57 - skipped

SEQ ID NO: 58 - protein, 471 aa, Oryza sativa
MAAAAAVADEVTVLHGGVVVSMDGGFRVFQDGAVAVAGDRIAAVGPSADVLSSFPGAAATVDLAGRILLPGFVNTHVHTSQQLARGIADDVDLMAWLHGRIWPYESHMTEEDSYASTLLCGIELIRSGVTCFAEAGGQYVSEMARAVELLGLRACLTKSIMDCGDGLPPNWSSCSTDDCIQSQKDLYEKHHNTADGRIRIWFGLRQIMNATDRLLLETRDAAQKLNTGIHMHIAEIPYENELVMQTKGIDHGTVTYLEKIDFLRSNLLAAHSVWLNKPEIGHFLKADVKVSHCPASAMRMLGFAPIREMLDSGVCVSLGTDGAPSNNRMSIVDEMYLACLINKGREAYITGTTNPTALPAETVLKMATINGAKAVLWDDEIGSLEVGKKADMVVVNPLIWSMVPVHDCIANIVYCMRTENIESVMCNGRWIMREKKIVNLNEEEVIASAEKIARDLLARAGINLPNRMNYL

SEQ ID NO: 59 - protein, 471 aa, Oryza sativa; identical to SEQ ID NO: 58

SEQ ID NO: 60 - DNA, 20 bp, Artificial Sequence
  Description of Artificial Sequence: Synthetic primer
ccattcttgagggagcagtc

SEQ ID NO: 61 - DNA, 20 bp, Artificial Sequence
  Description of Artificial Sequence: Synthetic primer
cacagtggccaaaaatgcta

(The sequence listing continues in the following parts.)
